(19) United States
(12) Patent Application Publication
(10) Pub. No.: US 2022/0195459 A1
(43) Pub. Date: Jun. 23, 2022

(54) REGULATABLE EXPRESSION USING ADENO-ASSOCIATED VIRUS (AAV)

(71) Applicant: Voyager Therapeutics, Inc., Cambridge, MA (US)

(72) Inventor: Robert KOTIN, Boston, MA (US)

(21) Appl. No.: 17/543,310

(22) Filed: Dec. 6, 2021

Related U.S. Application Data
(63) Continuation of application No. 15/772,023, filed on Apr. 27, 2018, now abandoned.
(60) Provisional application No. 62/247,365, filed on Oct. 28, 2015.
(60) Provisional application No. 62/298,640, filed on Feb. 23, 2016.

(51) Int. Cl. C12N 15/86; A61K 35/76; A61K 45/06; C07K 14/72; C12N 9/22; C12N 15/11

(52) U.S. Cl. CPC C12N 15/86; A61K 35/76; A61K 45/06; C07K 14/721; C12N 9/22; C12N 15/11; C12N 2840/002; C12N 2750/14143; Y02A 50/30; C12N 2750/14141; C12N 2310/20; C07K 2319/80; C12N 2830/001

(57) ABSTRACT

The present invention relates to viral particles which exhibit self-regulatory or regulatable features.

### CROSS REFERENCE TO RELATED APPLICATIONS

[0001] This application claims the benefit of U.S. Provisional Application No. US 62/247,365 filed Oct. 28, 2015, entitled Regulatable Expression Using Adeno-Associate Virus (AAV), and U.S. Provisional Application No. US 62/298,640 filed Feb. 23, 2016, entitled Regulatable Expression Using Adeno-Associate Virus (AAV), the contents of each are herein incorporated by reference in their entirety.

### REFERENCE TO THE SEQUENCE LISTING

[0002] The present application is being filed along with a Sequence Listing in electronic format. The Sequence Listing file, entitled 20571504PCT_SEQLST.txt, was created on Oct. 27, 2016 and is 5,113,878 bytes in size. The information in electronic format of the Sequence Listing is incorporated herein by reference in its entirety.

### FIELD OF THE INVENTION

[0003] The present invention relates to compositions, methods and processes for the design, preparation, manufacture and/or formulation of recombinant parvovirus, e.g. adeno-associated virus (AAV), particles having one or more regulatable elements and methods of using the same.

### BACKGROUND OF THE INVENTION

[0004] The present invention provides AAV-based compositions and complexes which go beyond those of the art in order to address the need for new technologies for treating genetic disorders caused by abnormalities in the genome whether heritable or acquired, monogenic or multifactorial.

[0005] AAV vectors are used for gene therapy for a number of reasons including their reduced immunogenicity and their sustained long-term presence and transgene expression in target tissues. Recombinant AAVs typically remain within target tissues as episomal entities over the lifetime of the animal host. Due to the long term stability of the AAV vector, it is desirable to exert tight control on transgene expression, e.g., the time, place and level of transgene expression must be controlled. For example, if transgene expression is no longer needed or undesirable, for example due to toxicity or side effects, efficient mechanisms are needed to turn expression off. In other cases, it may be desirable to turn reversibly transgene expression on and off very quickly.

[0006] A number of switches that function to regulate transgene expression in the context of cell systems and animal models have been described. One such mechanism of regulation relies on a chemical agent, such as a drug, or a physiological stimulus that acts as a switch to turn the expression of a transgene on or off. The most extensively studied regulatory switch mechanism is the Tet ON/OFF system, in which a tet repressor protein can only activate transcription from a promoter with a tet response element in the presence or absence of teracyclin, first described by Bujard and Gossen (Proc Natl Acad Sci U S A. 1992 Jun. 15; 89(12):5547-51, Tight control of gene expression in mammalian cells by tetracycline-responsive promoters; the contents of which are herein incorporated by reference in its entirety). Several ligand and hormone regulatable systems, which employ the dimerization of two separate proteins for activation or repression, have also been described.

[0007] Approaches in which a second transgene encodes a regulatory enzyme such as a CRE recombinase, which modulates expression of a target transgene through site specific recombination, is extensively used in transgenic mouse studies, where a tissue restricted or temporally restricted expression pattern is desired.

[0008] In addition, transgene expression can also be controlled through regulation of transcript mRNA stability or protein stability, through the inclusion of stabilizing or destabilizing elements.

[0009] The present invention provides AAV-based compositions comprising a recombinant adeno-associated virus particles (AAV particles) having at least one regulatable element. These elements when used in association with AAV technology allow, for the first time, the regulatable tuning of payload expression from a viral genome delivered by an AAV particle.

### SUMMARY OF THE INVENTION

[0010] The present invention provides regulatable-AAV particles comprising at least one regulatable element to regulate the expression of a transgene or gene. Such regulation can be the inhibition or activation of transgene or gene expression or gene replacement. Such outcomes are achieved by utilizing regulatable elements encoded in the AAV particles (e.g., regulatable-AAV particles) described herein (e.g., the payload or VP2) in such a manner as to tune or control the level or degree of expression of the payload (whether a polynucleotide useful for gene knockdown, activation, or inhibition, or for gene replacement) encoded by the viral genome.

[0011] In one embodiment, the present invention is a composition comprising an AAV particle comprising a viral genome encoding at least one payload and the AAV particle may also comprise a viral genome encoding at least one regulatable element. As a non-limiting example, the viral genome encoding at least one regulatable element may be part of the payload. In some embodiments, one or more regulatable elements may include one or more proteins or fusion proteins. In a non-limiting example, the proteins or fusion proteins may be composed of a DNA binding domain, a transactivation domain or a repressor domain, a ligand binding domain and/or a dimerization domain. In some embodiments, the protein or fusion protein may be inducible through a ligand. In another non-limiting example, the proteins or fusion proteins may include a meganuclease, a zinc finger nuclease, a TALEN, a recombinase, an integrase, and/or a CRISPR Cas9. In one embodiment, the regulatable element may comprise a CRISPR Cas9 and may further comprise a single guide RNA (sgRNA).

[0012] In some embodiments, the protein or fusion protein may further include a destabilizing domain, which may be stabilized through a ligand and/or may include the estrogen receptor destabilizing domain.

[0013] In some embodiments, the regulatable element may comprise a regulatory RNA, such as a siRNA, microRNA (miRNA or miR) or ribozyme.

[0014] In some embodiments, the composition may include two or more regulatable elements, wherein the second regulatable element regulates the expression of the first regulatable element. A number of combinations of regulatable elements can be envisioned according to the invention and are described herein. In some embodiments, the payload and the regulatable elements may be located on the same viral genome. In some embodiments, the payload and the regulatable elements may be located on one or more separate viral genome.

[0015] In another embodiment, the present invention is a method of synthesizing a regulatable-AAV particle comprising a) introducing into competent bacterial cells i) a payload construct vector comprising a payload and one or more regulatable elements flanked on each side by a parvoviral ITR sequence to produce a payload construct expression vector; and ii) one or more viral construct vector(s) comprising parvoviral rep and/or cap gene sequences under the control of one or more regulatable elements to produce a viral construct expression vector; b) introducing into viral replication cells i) the payload construct expression vector produced in step (a.i) to produce a payload construct particle; and ii) the viral construct expression vector(s) produced in step (a.ii) to produce a viral construct particle; and c) co-infecting a viral replication cell with the payload construct viral particle produced in step (b.i) and the one or more viral construct viral particle(s) of step (b.ii) to produce a regulatable-AAV particle.

[0016] In another embodiment, one or more regulatable-AAV particles may be synthesized, wherein the payload and the regulatable element may be on separate payload constructs.

[0017] In another embodiment, the present invention may include one or more regulatable-AAV particles comprising a viral genome, the viral genome comprising: (a) at least one payload, and (b) at least one regulatable element.

[0018] In another embodiment, the present invention may include a method of treating a CNS disorder in a subject in need thereof, the method comprising administering to the subject a therapeutically effective amount of one or more regulatable-AAV particles comprising one or more viral genome, the viral genome comprising: (a) at least one payload, and (b) at least one regulatable element.

[0019] In one embodiment, provided are methods of regulating the expression of a protein of interest using one or more regulatable-AAV particle(s) a viral genome. In one aspect, the viral genome may have at least one payload and at least one regulatable element such as, but not limited to, a DNA binding domain which may be coupled with a transactivation domain. The regulatable element may be located in the VP2 capsid and may increase the expression of a protein of interest in a burst like fashion. The increase may be for at least 2 hours or may be for at least 6 hours.

[0020] In another aspect, the viral genome may have at least one payload and at least one CRISPR regulatable element such as, but not limited to, a cas9 endonuclease fused to a destabilizing domain or a Cpf1. The destabilizing domain may be a destabilizing domain from a protein family such as, but not limited to, FK506 Binding Protein (FKBP), E. coli dihyrofolate reductase (DHFR), mouse ornithine decarboxylase (MODC), and estrogen receptors (ER). As a non-limiting example, the destabilizing domain is from an estrogen receptor protein.

[0021] The details of one or more embodiments of the invention are set forth in the accompanying description below. Although any materials and methods similar or equivalent to those described herein can be used in the practice or testing of the present invention, the preferred materials and methods are now described. Other features, objects and advantages of the invention will be apparent from the description. In the description, the singular forms also include the plural unless the context clearly dictates otherwise. Unless defined otherwise, all technical and scientific terms used herein have the same meaning as commonly understood by one of ordinary skill in the art to which this invention belongs. In the case of conflict, the present description will control.

### DETAILED DESCRIPTION OF THE INVENTION

[0022] The present invention relates to compositions, methods and processes for the design, preparation, manufacture and/or formulation of recombinant adeno-associated virus (AAV) particles having one or more regulatable elements and methods of using the same. In one embodiment, the regulatable elements may comprise CRISPR regulatable elements.

### Parvoviridae Virus, Viral Particle and Production of Viral Particles

[0023] Viruses of the Parvoviridae family are small non-enveloped icosahedral capsid viruses characterized by a single stranded DNA genome. Parvoviridae family viruses consist of two subfamilies: Parvovirinae, which infect vertebrates, and Densovirinae, which infect invertebrates. The parvoviruses and other members of the Parvoviridae family are generally described in Kenneth I. Berns, “Parvoviridae: The Viruses and Their Replication,” Chapter 69 in FIELDS VIROLOGY (3d Ed. 1996), the contents of which is incorporated by reference in its entirety.

[0024] The genome of the viruses of the Parvoviridae family may be modified to contain a minimum of components for the assembly of a functional recombinant virus which is loaded with or engineered to express or deliver a desired nucleic acid construct or payload, e.g., a transgene, polypeptide-encoding polynucleotide or modulatory nucleic acid, which may be delivered to a target cell, tissue or organism. As used herein, a “viral particle” refers to a functional recombinant virus.

[0025] The Parvoviridae family may be used as a biological tool due to a relatively simple structure that may be manipulated with standard molecular biology techniques.

[0026] The Parvoviridae family comprises the Dependovirus genus which includes adeno-associated viruses (AAVs) which are capable of replication in vertebrate hosts including, but not limited to, human, primate, bovine, canine, equine, and ovine species. The naturally occurring AAV Cap gene expresses VP1, VP2, and VP3 capsid proteins are encoded by a single open reading frame of the Cap gene under control of the p40 promoter. In one embodiment, nucleotide sequences encoding VP1, VP2 and VP3 proteins and/or amino acid sequences of AAV VP capsid proteins may be modified for increased efficiency to target to the central nervous system (e.g., CNS tissue tropism). Any of the VP genes of the serotypes selected from, but not limited to, AAV1, AAV2, AAV3, AAV4, AAV5, AAV6, AAV7, AAV8, AAV9, AAV10, and AAV11, AAV12, AAVrh8, AAVrh10, AAV-DJ, and AAV-DJ/8 capsid serotypes, or variants thereof (e.g., AAV3A and AAV3B) may be modified.

[0027] In one embodiment, the present invention provides administration and/or delivery methods for viral particles.

[0028] In some embodiments, the present invention provides administration and/or delivery methods for viral particles for the treatment and/or amelioration of diseases or disorders of the CNS. As a non-limiting example, the disease or disorder of the CNS is Alzheimer's Diseases (AD), Amyotrophic lateral sclerosis (ALS), Creutzfeldt-Jakob Disease, Huntingtin's disease (HD), Friedreich's ataxia (FA or FRDA), Parkinson Disease (PD), Multiple System Atrophy (MSA), Spinal Muscular Atrophy (SMA), Multiple Sclerosis (MS), Primary progressive aphasia, Progressive supranuclear palsy, Dementia, Brain Cancer, Degenerative Nerve Diseases, Encephalitis, Epilepsy, Genetic Brain Disorders that cause neurodegeneration, Retinitis pigmentosa (RP), Head and Brain Malformations, Hydrocephalus, Stroke, Prion disease, Infantile neuronal ceroid lipofuscinosis (INCL) (a neurodegenerative disease of children caused by a deficiency in the lysosomal enzyme palmitoyl protein thioesterase-1 (PPT1)).

[0029] In one embodiment, provided are particles comprising nucleic acids and cells (in vivo or in culture) comprising the nucleic acids and/or particles of the invention. Suitable particles include without limitation viral particles (e.g., adenovirus, AAV, herpes virus, vaccinia, poxviruses, baculoviruses, and the like), plasmids, phage, YACs, BACs, and the like as are well known in the art. Such nucleic acids, particles and cells can be used, for example, as reagents (e.g., helper packaging constructs or packaging cells) for the production of modified virus capsids or virus particles as described herein.

[0030] The particles of the invention which comprise nucleic acids include any genetic element (vector) which may be delivered to a host cell, e.g., naked DNA, plasmid, phage, transposon, cosmid, episome, a protein in a non-viral delivery vehicle (e.g., a lipid-based carrier), virus, etc., which transfers the sequences carried thereon. The methods used to construct any embodiment of this invention are known to those with skill in nucleic acid manipulation and include genetic engineering, recombinant engineering, and synthetic techniques. See, e.g., Sambrook et al, Molecular Cloning: A Laboratory Manual, Cold Spring Harbor Press, Cold Spring Harbor, N.Y.

[0031] The polynucleotide (e.g., transgene or payload) can be carried on any suitable vector, e.g., a plasmid, which is delivered to a host cell. The plasmids useful in this invention may be engineered such that they are suitable for replication and, optionally, integration in prokaryotic cells, mammalian cells, or both. These plasmids may contain sequences permitting replication of the transgene in eukaryotes and/or prokaryotes and selection markers for these systems. Selectable markers or reporter genes may include sequences encoding geneticin, hygromicin or purimycin resistance, among others. The plasmids may also contain certain selectable reporters or marker genes that can be used to signal the presence of the vector in bacterial cells, such as ampicillin resistance. Other components of the plasmid may include an origin of replication and an amplicon, such as the amplicon system employing the Epstein Barr virus nuclear antigen. This amplicon system, or other similar amplicon components permit high copy episomal replication in the cells. Preferably, the molecule carrying the transgene or payload is transfected into the cell, where it may exist transiently. Alternatively, the transgene may be stably integrated into the genome of the host cell, either chromosomally or as an episome. In certain embodiments, the transgene may be present in multiple copies, optionally in head-to-head, head-to-tail, or tail-to-tail concatamers. Suitable transfection techniques are known and may readily be utilized to deliver the transgene to the host cell.

[0032] In some embodiments, the payload may be delivered in a viral particle derived from an adenoviral vector. In another embodiment, the payload may be delivered in a viral particle derived from a lentiviral vector. In yet another embodiment, the payload may be delivered in a viral particle derived from any other gene delivery vector known in the art.

### AAV Particle

[0033] In one embodiment, the present invention provides administration and/or delivery methods for AAV particles. As used herein, “AAV particles” refers to a viral particle where the virus is adeno-associated virus (AAV). An AAV particle comprises a viral genome and a capsid. As used herein, “viral genome” is a polynucleotide encoding at least one inverted terminal repeat (ITR), at least one regulatory sequence, and at least one payload. In one embodiment, the viral genome or any portion thereof may be codon optimized.

[0034] The AAV particles described herein may be useful in the fields of human disease, antibodies, viruses, veterinary applications and a variety of in vivo and in vitro settings.

[0035] In some embodiments, AAV particles described herein are useful in the field of medicine for the treatment, palliation and/or amelioration of conditions or diseases such as, but not limited to, blood, cardiovascular, CNS, and/or genetic disorders.

[0036] In some embodiments, AAV particles in accordance with the present invention may be used for the treatment of disorders, and/or conditions, including but not limited to neurological disorders (e.g., Alzheimer's disease, Huntington's disease, autism, Parkinson's disease, Spinal muscular atrophy, Friedreich's ataxia).

[0037] In some embodiments, the present invention provides administration and/or delivery methods for AAV particles for the treatment and/or amelioration of diseases or disorders of the CNS. As a non-limiting example, the disease or disorder of the CNS is Alzheimer's Diseases (AD), Amyotrophic lateral sclerosis (ALS), Creutzfeldt-Jakob Disease, Huntingtin's disease (HD), Friedreich's ataxia (FA or FRDA), Parkinson Disease (PD), Multiple System Atrophy (MSA), Spinal Muscular Atrophy (SMA), Multiple Sclerosis (MS), Primary progressive aphasia, Progressive supranuclear palsy, Dementia, Brain Cancer, Degenerative Nerve Diseases, Encephalitis, Epilepsy, Genetic Brain Disorders that cause neurodegeneration, Retinitis pigmentosa (RP), Head and Brain Malformations, Hydrocephalus, Stroke, Prion disease, Infantile neuronal ceroid lipofuscinosis (INCL) (a neurodegenerative disease of children caused by a deficiency in the lysosomal enzyme palmitoyl protein thioesterase-1 (PPT1)).

[0038] In some embodiments, AAV particles produced according to the present invention may target to deliver and/or to transfer a payload of interest to specific population of cells in specific anatomical regions (e.g., dopaminergic (DAergic) neurons in the Substantia Nigra (SN)) in the central nervous system).

[0039] In one embodiment, the AAV particles of the invention may be a single-stranded AAV (ssAAV) or a self-complementary AAV (scAAV) described herein or known in the art.

### Payload

[0040] AAV particles of the present invention may comprise a nucleic acid sequence encoding at least one “payload.” As used herein, a “payload” refers to one or more polynucleotides or polynucleotide regions encoded by or within a viral genome or an expression product of such polynucleotide or polynucleotide region, e.g., a transgene, a polynucleotide encoding a polypeptide or multi-polypeptide or a modulatory nucleic acid or regulatory nucleic acid.

[0041] The payload may comprise any nucleic acid known in the art which is useful for modulating the expression in a target cell transduced or contacted with the AAV particle carrying the payload. In one embodiment, modulation may be by supplementation of the payload in a target cell or tissue. In one embodiment, modulation may be gene replacement of the payload in a target cell or tissue. In one embodiment, modulation may be by inhibition using a modulatory nucleic acid of the payload in a target cell or tissue.

[0042] In one embodiment, the payload may comprise a combination of coding and non-coding nucleic acid sequences.

[0043] In one embodiment, the payload or any portion thereof may be codon optimized.

[0044] In one embodiment, the one or more payloads may comprise one or more regulatable elements. In one embodiment, payload expression may be governed by a regulatable system which comprises one or more regulatable elements.

mRNA

[0045] In one embodiment, a messenger RNA (mRNA) may be encoded by a payload. As used herein, the term “messenger RNA” (mRNA) refers to any polynucleotide which encodes a polypeptide of interest and which is capable of being translated to produce the encoded polypeptide of interest in vitro, in vivo, in situ, or ex vivo. The components of an mRNA include, but are not limited to, a coding region, a 5′UTR, a 3′UTR, a 5′ cap and a poly-A tail. In some embodiments, the encoded mRNA or any portion of the mRNA be codon optimized.

[0046] Traditionally, the basic components of an mRNA molecule include at least a coding region, a 5′UTR, a 3′UTR, a 5′ cap and a poly-A tail. According to the present invention, payloads encoding mRNA may comprise a coding region only. The payloads may also comprise a coding region and at least one UTR. The payloads may also comprise a coding region, 3′UTR and polyA tail.

[0047] In one embodiment, the mRNA may be codon optimized.

[0048] In one embodiment, the payload may encode a gene therapy product. A gene therapy product may comprise a polypeptide, RNA molecule, or other gene product that, when expressed in a target cell, provides a desired therapeutic effect. In some embodiments, a gene therapy product may comprise a substitute for a non-functional gene that is absent or mutated.

### Polypeptide

[0049] In one embodiment, the payload encodes a polypeptide which may be a peptide or protein. A protein encoded by the payload may comprise a secreted protein, an intracellular protein, an extracellular protein, a membrane protein, and/or fragment or variant thereof.

[0050] In one embodiment, the encoded proteins may be structural or functional.

[0051] In one embodiment, proteins encoded by the payload construct payload construct include, but are not limited to, mammalian proteins.

[0052] In one embodiment the protein encoded by the payload is between 50-5000 amino acids in length. In some embodiments the protein encoded is between 50-2000 amino acids in length. In some embodiments the protein encoded is between 50-1000 amino acids in length. In some embodiments the protein encoded is between 50-1500 amino acids in length. In some embodiments the protein encoded is between 50-1000 amino acids in length. In some embodiments the protein encoded is between 50-800 amino acids in length. In some embodiments the protein encoded is between 50-600 amino acids in length. In some embodiments the protein encoded is between 50-400 amino acids in length. In some embodiments the protein encoded is between 50-200 amino acids in length. In some embodiments the protein encoded is between 50-100 amino acids in length.

[0053] In some embodiments the peptide encoded by the payload is between 4-50 amino acids in length. In one embodiment, the shortest length of a region of the payload of the present invention encoding a peptide can be the length that is sufficient to encode for a tetrapeptide, a pentapeptide, a hexapeptide, a heptapeptide, an octapeptide, a nonapeptide, or a decapeptide. In another embodiment, the length may be sufficient to encode a peptide of 2-30 amino acids, e.g. 5-30, 10-30, 2-25, 5-25, 10-25, or 10-20 amino acids. The length may be sufficient to encode for a peptide of at least 11, 12, 13, 14, 15, 17, 20, 25 or 30 amino acids, or a peptide that is no longer than 50 amino acids, e.g. no longer than 35, 30, 25, 20, 17, 15, 14, 13, 12, 11 or 10 amino acids.

Modulatory nucleic acids

[0054] In one embodiment, an RNA sequence encoded by the payload may be a tRNA, rRNA, tmRNA, miRNA, RNAi, siRNA, piRNA, shRNA antisense RNA, double stranded RNA, snRNA, snoRNA, and/or long non-coding RNA (lncRNA). These RNA sequences along with siRNA, shRNA, antisense molecules and the like may also be referred to as “modulatory nucleic acids.”

[0055] In one embodiment, the RNA encoded by the payload is a lncRNA or RNAi construct designed to target lncRNA. Non-limiting examples of such lncRNA molecules and RNAi constructs designed to target such lncRNA are taught in International Publication, WO2012/018881, the contents of which are incorporated by reference in their entirety.

[0056] In one embodiment, the payload encodes a microRNA (miRNA) or engineered precursors thereof, as the payload. MicroRNAs (miRNAs) are 19-25 nucleotide RNAs that bind to nucleic acid molecules and down-regulate gene expression either by reducing nucleic acid molecule stability or by inhibiting translation. As a non-limiting example, the payloads described herein may encode one or more microRNA target sequences, microRNA sequences, or microRNA seeds, or any known precursors thereof such as pre- or pri-microRNAs. Such sequences may correspond to any known microRNA such as those taught in US Publication US2005/0261218 and US Publication US2005/0059005, the contents of which are incorporated herein by reference in their entirety.

[0057] A microRNA sequence comprises a “seed” region, i.e., a sequence in the region of positions 2-8 of the mature microRNA, which sequence has perfect Watson-Crick complementarity to the miRNA target sequence. A microRNA seed may comprise positions 2-8 or 2-7 of the mature microRNA. In some embodiments, a microRNA seed may comprise 7 nucleotides (e.g., nucleotides 2-8 of the mature microRNA), wherein the seed-complementary site in the corresponding miRNA target is flanked by an adenine (A) opposed to microRNA position 1. In some embodiments, a microRNA seed may comprise 6 nucleotides (e.g., nucleotides 2-7 of the mature microRNA), wherein the seed-complementary site in the corresponding miRNA target is flanked by an adenine (A) opposed to microRNA position 1. See for example, Grimson A, Farh K K, Johnston W K, Garrett-Engele P, Lim L P, Bartel D P; Mol Cell. 2007 Jul. 6; 27(1):91-105; each of which is herein incorporated by reference in their entirety. The bases of the microRNA seed have complete complementarity with the target sequence.

[0058] In one embodiment, tissue specific microRNAs may be used for tissue specific regulation of the payload. For example, to allow for systemic administration targeting liver and brain, Xie et al. (Xie J, Xie Q, Zhang H, Ameres S L, Hung J H, Su Q, et al. MicroRNA-regulated, systemically delivered rAAV9: a step closer to CNS-restricted transgene expression. Molecular Therapy. 2010; 19(3):526-535), the contents of which is herein incorporated by reference in its entirety, used liver-specific, endogenous microRNAs (miRNAs) to repress rAAV expression outside the CNS, by including miRNA-binding sites into the rAAV9 construct.

[0059] In one embodiment, one or more microRNA binding sites may be included in the payload construct to de-target, i.e., to reduce or eliminate payload expression in a particular tissue. MicroRNA binding sites may be inserted 5′ or 3′ of the payload or both. In some embodiments, microRNA binding sites may be located within the payload sequence. In one embodiment, the micro RNA binding sites are all specific to one microRNA. In other embodiments, the microRNA binding sites are specific for two or more different microRNAs.

[0060] In one embodiment, the payload encodes an RNA sequence that may be processed to produce a siRNA, miRNA or other double stranded (ds) or single stranded (ss) gene modulatory nucleic acids or motifs.

[0061] In one embodiment, the siRNA duplexes or dsRNA encoded by the payload can be used to inhibit gene expression in a cell, in particular cells of the CNS. In some aspects, the inhibition of gene expression refers to an inhibition by at least about 20%, 30%, 40%, 50%, 60%, 70%, 80%, 85%, 90%, 95% and 100%. In one aspect, the protein product of the targeted gene may be inhibited by at least about 20%, 30%, 40%, 50%, 60%, 70%, 80%, 85%, 90%, 95% and 100%. The gene can be either a wild type gene or a gene with at least one mutation (mutated gene). The targeted protein may be either a wild type protein or a protein with at least one mutation (mutated protein).

[0062] In one embodiment, the present invention provides methods for treating, or ameliorating a disease or condition associated with abnormal gene and/or protein in a subject in need of treatment, the method comprising administering to the subject any effective amount of at least one AAV particle encoding an siRNA duplex targeting the gene, delivering duplex into targeted cells, inhibiting the gene expression and protein production, and ameliorating symptoms of the disease or condition in the subject. Gene replacement or activation

[0063] In one embodiment, the payload encodes an RNA sequence to increase the expression of a gene or replace a gene. As a non-limiting example, AAV particles may comprise a viral genome comprising a payload which encodes a normal gene to replace a mutated, defective or nonfunctional copy of that gene in the recipient.

[0064] In some aspects, the increase of gene expression refers to an increase by at least about 20%, 30%, 40%, 50%, 60%, 70%, 80%, 85%, 90%, 95% and 100%. In one aspect, the protein product of the targeted gene may be increased by at least about 20%, 30%, 40%, 50%, 60%, 70%, 80%, 85%, 90%, 95% and 100%.

### Functional Payloads

[0065] In one embodiment, a payload may encode polypeptides that are or can be a fusion protein.

[0066] In one embodiment, a payload may encode polypeptides that are or can be polypeptides having a desired biological activity.

[0067] In one embodiment, a payload may encode polypeptides that are or can be gene products that can complement a genetic defect.

[0068] In one embodiment, a payload may encode polypeptides that are or can be RNA molecules.

[0069] In one embodiment, a payload may encode polypeptides that are or can be transcription factors.

[0070] In one embodiment, a payload may encode polypeptides that are or can be other gene products that are of interest in regulation and/or expression.

[0071] In one embodiment, a payload may comprise nucleotide sequences that provide a desired effect or regulatory function (e.g., transposons, transcription factors).

[0072] In one embodiment, a payload may comprise nucleotide sequences or encode hormone receptors (e.g., mineral corticosteroid, glucocorticoid, and thyroid hormone receptors), intramembrane proteins (e.g., TM-1 and TM-7), intracellular receptors (e.g., orphans, retinoids, vitamin D3 and vitamin A receptors), signaling molecules (e.g., kinases, transcription factors, or molecules such as signal transducers and activators of transcription receptors of the cytokine superfamily (e.g. erythropoietin, growth hormone, interferons, and interleukins, and colony-stimulating factors, G-protein coupled receptors, e.g., hormones, calcitonin, epinephrine, gastrin, and paracrine or autocrine mediators, such as somatostatin or prostaglandins, neurotransmitter receptors (norepinephrine, dopamine, serotonin or acetylcholine), and/or pathogenic antigens which can be of viral, bacterial, allergenic, or cancerous origin, and tyrosine kinase receptors (such as insulin growth factor, and nerve growth factor).

[0073] The encoded payload may comprise a gene therapy product. In some embodiments, a gene therapy product may comprise a substitute for a non-functional gene that is absent or mutated.

[0074] In one embodiment, a payload may encode polypeptides that are or can be a marker to assess cell transformation and expression.

[0075] In one embodiment, a payload may comprise or encode a selectable marker. A selectable marker may comprise a gene sequence or a protein encoded by a gene sequence expressed in a host cell that allows for the identification, selection, and/or purification of the host cell from a population of cells that may or may not express the selectable marker. In one embodiment, the selectable marker provides resistance to survive a selection process that would otherwise kill the host cell, such as treatment with an antibiotic. In another embodiment, an antibiotic selectable marker may comprise one or more antibiotic resistance factors, including but not limited to neomycin resistance (e.g., neo), hygromycin resistance, kanamycin resistance, and/or puromycin resistance.

[0076] In some embodiments, a payload may comprise or encode any nucleic acid sequence encoding a polypeptide can be used as a selectable marker comprising recognition by a specific antibody.

[0077] In some embodiments, a payload may comprise or encode a cell-surface marker, such as any protein expressed on the surface of the cell including, but not limited to receptors, CD markers, lectins, integrins, or truncated versions thereof. In some embodiments, cells that comprise a cell-surface marker may be selected using an antibody targeted to the cell-surface marker. In some embodiments an antibody targeted to the cell-surface marker may be directly conjugated with a selection agent including, but not limited to a fluorophore, sepharose, or magnetic bead. In some embodiments an antibody targeted to the cell-surface marker may be detected using a secondary labeled antibody or substrate which binds to the antibody targeted to the cell-surface marker. In some embodiments, a selectable marker may comprise negative selection by using an enzyme, including but not limited to Herpes simplex virus thymidine kinase (HSVTK) that converts a pro-toxin (ganciclovir) into a toxin or bacterial Cytosine Deaminase (CD) which converts the pro-toxin 5′-fluorocytosine (5′-FC) into the toxin 5′-fluorouracil (5′-FU). In some embodiments, any nucleic acid sequence encoding a polypeptide can be used as a selectable marker comprising recognition by a specific antibody.

[0078] In some embodiments, a payload may comprise or encode a selectable marker including, but not limited to, β-lactamase, luciferase, β-galactosidase, or any other reporter gene as that term is understood in the art, including cell-surface markers, such as CD4 or the truncated nerve growth factor (NGFR) (for GFP, see WO 96/23810; Heim et al., Current Biology 2:178-182 (1996); Heim et al., Proc. Natl. Acad. Sci. USA (1995); or Heim et al., Science 373:663-664 (1995); for β-lactamase, see WO 96/30540; the contents of each of which are herein incorporated by reference in its entirety).

[0079] In some embodiments, a payload may comprise or encode a selectable marker comprising a fluorescent protein. A fluorescent protein as herein described may comprise any fluorescent marker including but not limited to green, yellow, and/or red fluorescent protein (GFP, YFP, and/or RFP).

[0080] In one embodiment, the AAV particles of the present invention are designed for expression of multiple functional RNAs in a single vector as described in Björklund et al (Expression of multiple functional RNAs or proteins from one viral vector; Methods in Molecular Biology; 2016; 1382:41-56), the contents of which are herein incorporated by reference in their entirety. In one embodiment, the viral genome is a polycistronic vector encoding fusion proteins, or comprising ribosome skipping sequence(s) or internal ribosome entry sites. In one embodiment, the AAV particles of the present invention designed for expression of multiple functional RNAs in a single vector utilize multiple promoters, such as, but not limited to bi-directional promoters (Pol II-based), dual promoters, combined Pol II and Pol III promoters, or dual Pol II promoters.

### Payload Construct

[0081] In one embodiment, the AAV particle may comprise a payload construct. As used herein, “payload construct” refers to one or more polynucleotide regions encoding or comprising a payload that is flanked on one or both sides by an inverted terminal repeat (ITR) sequence.

[0082] In one embodiment, the payload construct may comprise more than one payload. As a non-limiting example, a target cell transduced with an AAV particle comprising more than one payload may express each of the payloads in a single cell.

[0083] In some embodiments, the payload construct may encode a coding or non-coding RNA.

[0084] In one embodiment, a payload construct encoding one or more payloads for expression in a target cell may comprise one or more payload or non-payload nucleotide sequences operably linked to at least one target cell-compatible promoter.

[0085] In one embodiment, the ITRs in the AAV particle are derived from the same AAV serotype.

[0086] In one embodiment, the ITRs in the AAV particle are derived from different AAV serotypes.

[0087] In one embodiment, the ITRs in the AAV particle are the same.

[0088] In one embodiment, the ITRs in the AAV particle are different. In one aspect, the ITRs may be derived from the same AAV serotype. In another aspect, the ITRs may be derived from different serotypes.

[0089] In some embodiments, the payload construct may include a sequence that allows the translation of several proteins from a single construct (i.e., bicistronic or multicistronic construct). In a non-limiting example, such a sequence may include a cleavage site, such as a 2A peptide. In some embodiments, the 2A cleavage site may be a 2A peptide site from foot-and-mouth disease virus (F2A sequence), equine rhinitis A virus (E2A), Thosea asigna virus (T2A), and porcine teschovirus-1 (P2A), as described in US Publication No. 20070116690, the contents of which is herein incorporated by reference in its entirety. In some embodiments, the cleavage site may be a furin cleavage site known in the art. In another non-limiting example, such a regulatory sequence may include an internal ribosomal entry site (IRES), which allows for translation initiation in the middle of the transcript. In some embodiments, an internal stop codon may be positioned 5′ of the IRES.

### Promoters

[0090] A payload construct encoding one or more payloads for expression in a target cell may comprise one or more payload or non-payload nucleotide sequences operably linked to at least one target cell-compatible promoter. A person skilled in the art may recognize that a target cell may require a specific promoter including but not limited to a promoter that is species specific, inducible, tissue-specific, or cell cycle-specific (Parr et al., Nat. Med. 3:1145-9 (1997)).

[0091] While a constitutive promoter drives ubiquitous and temporally unrestricted expression, tissue specific and/or inducible promoters allow more tight control of desired expression.

[0092] In some embodiments, expression of the payload may be desirable only in a particular tissue of interest. In one aspect, it may be desirable to exercise tight temporal control, i.e. turn the payload on or off in a particular tissue of interest. In some embodiments, this means that the promoter is not “leaky”, i.e., the promoter does not drive expression in another unwanted cell type or tissue or does not drive unwanted expression at a time when the promoter is not induced, even if it is at a lower level.

[0093] In some embodiments, the payload construct comprises a tissue specific promoter. Non-limiting examples of tissue specific promoters are listed in Table 1 and are for example described in Papadakis et al. 2004; Current Gene Therapy, 4, 98-113 and Kantor et al., 2014 Adv Genet. 2014; 87: 125-197, the contents of each which is herein incorporated by reference in its entirety, and references therein.

TABLE 1
Tissue Specific Promoters

| Promoter | Tissue |
|---|---|
| Apo A-I, ApoE, a1-antitrypsin (hAAT), Apo A-I, Transthyretin, | Liver |
| Liver-enriched activator, Albumin, Phosphoenolpyruvate | |
| carboxykinase (PEPCK), RNAPII promoter | |
| PAI-1 (plasminogen activator inhibitor 1), ICAM-2, Endoglin, | Endothelium |
| ICAM-2 (intercellular adhesion molecule 2), flt-1(fms-like | |
| tyrosine kinase-1), vWF (von-Willebrand factor) | |
| MCK (muscle creatine kinase), SMC a-actin, Myosin heavy- | Muscle |
| chain, Myosin light-chain | |
| Cytokeratin 18, CFTR (cystic fibrosis transmembrane | Epithelium |
| conductance regulator) | |
| GFAP (glial fibrillary acidic protein) | Neuronal (Astrocytes) |
| NSE (neuronal-specific endolase) | Neuronal (Neurons) |
| Synapsin I | Neuronal (Neurons) |
| Preproenkephalin | Neuronal (All of CNS) |
| Dopamine b-hydroxylase (dbH) | Neuronal |
| Prolactin | Neuronal |
| Myelin basic protein | Neuronal |
| | (Oligodendrocytes) |
| F4/80 | Neuronal (Microglia) |
| MeCP2 (MeP229) | Neuronal (Neurons) |
| MCH | Neuronal (MCH neurons) |
| CaMKII | Neuronal |
| Ankyrin, a-spectrin, Globin, HLA-Dra, CD4, Dectin-2 | Erythroid |

[0094] In one embodiment, a payload construct encoding one or more payloads for expression in a target cell may comprise one or more payload sequences operably linked to a tissue specific promoter which expresses only in certain tissues or cell types.

[0095] In one embodiment, a payload construct may comprise one or more payload sequences operably linked to a constitutive promoter which is continuously, strongly and ubiquitously expressed. Non-limiting examples of constitutive promoters included, but are not limited to, those described in Qin et al., (PLOS One, 2010; DOI: 10.1371/journal.pone.0010611) and those listed in Table 2.

TABLE 2
Constitutive Promoters

| Promoter | Reference |
|---|---|
| Cytomegalovirus (CMV) | Qin et al. and references therein |
| simian virus 40 early promoter (SV40) | Qin et al. and references therein |
| human Ubiquitin C promoter (UBC) | Qin et al. and references therein |
| human elongation factor 1α promoter (EF1A) | Qin et al. and references therein |
| mouse phosphoglycerate kinase 1 promoter | Qin et al. and references therein; Papadakis |
| (PGK); human phosphoglycerate kinase 1 | et al. 2004 and references therein |
| (PGK1) | |
| chicken β-Actin promoter coupled with | Qin et al. and references therein |
| glucose 6-phosphate dehydrogenase | Papadakis et al. 2004 and references therein |

[0096] In one embodiment, a payload construct encoding one or more payloads for expression in a target cell may comprise one or more payload sequences operably linked to one or more inducible promoters, such that the payload expression may be regulated in a temporal or spatial manner.

[0097] In some embodiments the inducible promoter may be a minimal promoter, which comprises one or more DNA binding elements for a transcription factor DNA binding domain, which is the main or sole driver of transcription from the promoter. In one embodiment, the promoter may be tightly controlled and is not leaky.

[0098] In one embodiment, the promoter may be a Pol II promoter, such as the CMV promoter.

[0099] In another embodiment, the promoter may be a Pol III promoter, such as the U6 promoter.

[0100] In one embodiment, the promoter may be a viral promoter.

[0101] In another embodiment, the promoter may be a non-viral promoter.

[0102] In one embodiment the promoter may comprise enhancer sequences, such as CMV IE enhancer.

[0103] In some embodiments, the payload may be under the control of an inducible promoter, which can be temporally regulated. The regulatable element may comprise a chemical agent (i.e. a natural or artificial ligand, compound or drug) or physiological stimulus.

[0104] Promoter inducible elements are regulated by exogenously provided chemical agents or physiological stimuli. In some embodiments, the payload expression occurs in a dose-dependent manner, depending on the dose of the chemical agent or physiological stimulus.

[0105] In some embodiments, the promoter may be a minimal promoter containing one or more DNA binding elements to which the DNA binding domain of a particular transcription factor or fusion protein binds, wherein transcription from the promoter can only occur upon binding of the transcription factor. The promoter may contain 1, 2, 3, 4, 5, 6, 7, 8, 9, 10 or more such binding elements.

[0106] In some embodiments, the inducible promoter may be tissue specific. In some embodiments, the inducible promoter may be neuron-specific. In some embodiments, the promoter may be the CamKII promoter, which may additionally comprise one or more promoter inducible elements. In some embodiments, the one or more inducible elements may be tetracycline-inducible tetracycline response elements. In one embodiment, the regulatable element may comprise a tetracycline inducible transactivator protein. In one embodiment, the inducible promoter driving payload expression may be the promoter described in US Publication No. US20120004277, the contents of which is herein incorporated by reference in its entirety.

[0107] In one embodiment, the promoter may comprise one or more HIV TAT protein binding elements. For example, the promoter may comprise the HIV-1 ITR fused to the Drosophila hsp70 minimal heat shock promoter, as described in U.S. Pat. No. 8,138,327, the contents of which is herein incorporated by reference in its entirety. Without wishing to be bound by theory, this would allow the promoter to be induced upon HIV infection. In this scenario, the promoter may drive the expression of a payload that inhibits HIV gene expression, such as an anti-HIV short hairpin RNA, as described in U.S. Pat. No. 8,138,327.

[0108] In one embodiment, the promoter may be the bovine leukemia virus promoter, which is inducible by the viral protein Tax. In another embodiment, Tax may be provided through the regulatable element as described in U.S. Pat. No. 7,297,536, the contents of which is herein incorporated by reference in its entirety.

[0109] In some embodiments, the promoter driving the expression of any of the regulatable elements described herein may also be regulated, i.e., may be inducible, repressible, tissue specific, or constitutive.

### Capsids and Capsid Serotypes

[0110] In some embodiments, AAV particles of the present invention may be packaged in a capsid structure or may be capsid free. Such capsid free donor and/or acceptor sequences such as AAV, are described in, for example, US Publication 20140107186, the content of which is incorporated by reference in its entirety.

[0111] In one embodiment, the present invention, provides nucleic acids encoding the mutated or modified virus capsids and capsid proteins of the invention. In some embodiments the capsids are engineered according to the methods of co-owned and co-pending International Publication No. WO2015191508, the contents of which are herein incorporated by reference in their entirety.

[0112] In some embodiments, AAV particles produced according to the present invention may comprise hybrid serotypes with enhanced transduction to specific cell types of interest in the central nervous system, prolonged transgene expression and/or a safety profile. The hybrid serotypes may be generated by transcapsidation, adsorption of bi-specific antibody to capsid surface, mosaic capsid, and chimeric capsid, and/or other capsid protein modifications.

[0113] In some embodiments, AAV particles of the present invention may be further modified toward a specific therapeutic application by rational mutagenesis of capsid proteins (see, e.g., Pulicherla et al., Mol Ther, 2011, 19: 1070-1078), incorporation of peptide ligands to the capsid, for example a peptide derived from an NMDA receptor agonist for enhanced retrograde transport (Xu et al., Virology, 2005, 341: 203-214), and directed evolution to produce new AAV variants for increased CNS transduction.

[0114] In some embodiments, AAV particles produced according to the present invention may comprise different capsid proteins, either naturally occurring and/or recombinant, including, but not limited to, AAV1, AAV2, AAV3, AAV4, AAVS, AAV6, AAV7, AAV8, AAV9, AAV10, and AAV11, AAV12, AAVrh8, AAVrh10, AAV-DJ, and AAV-DJ/8 capsid serotypes, or variants thereof (e.g., AAV3A and AAV3B). Nucleic acid sequences encoding one or more AAV capsid proteins useful in the present invention are disclosed in the commonly owned International Publication No. WO2015191508, the contents of which are herein incorporated by reference in their entirety.

[0115] In some embodiments, AAV particles of the present invention may comprise or be derived from any natural or recombinant AAV serotype. According to the present invention, the AAV particles may utilize or be based on a serotype selected from any of the following AAV1, AAV2, AAV2G9, AAV3, AAV3a, AAV3b, AAV3-3, AAV4, AAV4-4, AAV5, AAV6, AAV6.1, AAV6.2, AAV6.1.2, AAV7, AAV7.2, AAV8, AAV9, AAV9.11, AAV9.13, AAV9.16, AAV9.24, AAV9.45, AAV9.47, AAV9.61, AAV9.68, AAV9.84, AAV9.9, AAV10, AAV11, AAV12, AAV16.3, AAV24.1, AAV27.3, AAV42.12, AAV42-1b, AAV42-2, AAV42-3a, AAV42-3b, AAV42-4, AAV42-5a, AAV42-5b, AAV42-6b, AAV42-8, AAV42-10, AAV42-11, AAV42-12, AAV42-13, AAV42-15, AAV42-aa, AAV43-1, AAV43-12, AAV43-20, AAV43-21, AAV43-23, AAV43-25, AAV43-5, AAV44.1, AAV44.2, AAV44.5, AAV223.1, AAV223.2, AAV223.4, AAV223.5, AAV223.6, AAV223.7, AAV1-7/rh.48, AAV1-8/rh.49, AAV2-15/rh.62, AAV2-3/rh.61, AAV2-4/rh.50, AAV2-5/rh.51, AAV3.1/hu.6, AAV3.1/hu.9, AAV3-9/rh.52, AAV3-11/rh.53, AAV4-8/r11.64, AAV4-9/rh.54, AAV4-19/rh.55, AAV5-3/rh.57, AAV5-22/rh.58, AAV7.3/hu.7, AAV16.8/hu.10, AAV16.12/hu.11, AAV29.3/bb.1, AAV29.5/bb.2, AAV106.1/hu.37, AAV114.3/hu.40, AAV127.2/hu.41, AAV127.5/hu.42, AAV128.3/hu.44, AAV130.4/hu.48, AAV145.1/hu.53, AAV145.5/hu.54, AAV145.6/hu.55, AAV161.10/hu.60, AAV161.6/hu.61, AAV33.12/hu.17, AAV33.4/hu.15, AAV33.8/hu.16, AAV52/hu.19, AAV52.1/hu.20, AAV58.2/hu.25, AAVA3.3, AAVA3.4, AAVA3.5, AAVA3.7, AAVC1, AAVC2, AAVCS, AAV-DJ, AAV-DJ8, AAVF3, AAVFS, AAVH2, AAVrh.72, AAVhu.8, AAVrh.68, AAVrh.70, AAVpi.1, AAVpi.3, AAVpi.2, AAVrh.60, AAVrh.44, AAVrh.65, AAVrh.55, AAVrh.47, AAVrh.69, AAVrh.45, AAVrh.59, AAVhu.12, AAVH6, AAVLK03, AAVH-1/hu.1, AAVH-5/hu.3, AAVLG-10/rh.40, AAVLG-4/rh.38, AAVLG-9/hu.39, AAVN721-8/rh.43, AAVCh.5, AAVCh.5R1, AAVcy.2, AAVcy.3, AAVcy.4, AAVcy.5, AAVCy.5R1, AAVCy.5R2, AAVCy.5R3, AAVCy.5R4, AAVcy.6, AAVhu.1, AAVhu.2, AAVhu.3, AAVhu.4, AAVhu.5, AAVhu.6, AAVhu.7, AAVhu.9, AAVhu.10, AAVhu.11, AAVhu.13, AAVhu.15, AAVhu.16, AAVhu.17, AAVhu.18, AAVhu.20, AAVhu.21, AAVhu.22, AAVhu.23.2, AAVhu.24, AAVhu.25, AAVhu.27, AAVhu.28, AAVhu.29, AAVhu.29R, AAVhu.31, AAVhu.32, AAVhu.34, AAVhu.35, AAVhu.37, AAVhu.39, AAVhu.40, AAVhu.41, AAVhu.42, AAVhu.43, AAVhu.44, AAVhu.44R1, AAVhu.44R2, AAVhu.44R3, AAVhu.45, AAVhu.46, AAVhu.47, AAVhu.48, AAVhu.48R1, AAVhu.48R2, AAVhu.48R3, AAVhu.49, AAVhu.51, AAVhu.52, AAVhu.54, AAVhu.55, AAVhu.56, AAVhu.57, AAVhu.58, AAVhu.60, AAVhu.61, AAVhu.63, AAVhu.64, AAVhu.66, AAVhu.67, AAVhu.14/9, AAVhu.t 19, AAVrh.2, AAVrh.2R, AAVrh.8, AAVrh.8R, AAVrh.10, AAVrh.12, AAVrh.13, AAVrh.13R, AAVrh.14, AAVrh.17, AAVrh.18, AAVrh.19, AAVrh.20, AAVrh.21, AAVrh.22, AAVrh.23, AAVrh.24, AAVrh.25, AAVrh.31, AAVrh.32, AAVrh.33, AAVrh.34, AAVrh.35, AAVrh.36, AAVrh.37, AAVrh.37R2, AAVrh.38, AAVrh.39, AAVrh.40, AAVrh.46, AAVrh.48, AAVrh.48.1, AAVrh.48.1.2, AAVrh.48.2, AAVrh.49, AAVrh.51, AAVrh.52, AAVrh.53, AAVrh.54, AAVrh.56, AAVrh.57, AAVrh.58, AAVrh.61, AAVrh.64, AAVrh.64R1, AAVrh.64R2, AAVrh.67, AAVrh.73, AAVrh.74, AAVrh8R, AAVrh8R A586R mutant, AAVrh8R R533A mutant, AAAV, BAAV, caprine AAV, bovine AAV, AAVhE1.1, AAVhEr1.5, AAVhER1.14, AAVhEr1.8, AAVhEr1.16, AAVhEr1.18, AAVhEr1.35, AAVhEr1.7, AAVhEr1.36, AAVhEr2.29, AAVhEr2.4, AAVhEr2.16, AAVhEr2.30, AAVhEr2.31, AAVhEr2.36, AAVhER1.23, AAVhEr3.1, AAV2.5T , AAV-PAEC, AAV-LK01, AAV-LK02, AAV-LK03, AAV-LK04, AAV-LK05, AAV-LK06, AAV-LK07, AAV-LK08, AAV-LK09, AAV-LK10, AAV-LK11, AAV-LK12, AAV-LK13, AAV-LK14, AAV-LK15, AAV-LK16, AAV-LK17, AAV-LK18, AAV-LK19, AAV-PAEC2, AAV-PAEC4, AAV-PAEC6, AAV-PAEC7, AAV-PAEC8, AAV-PAEC11, AAV-PAEC12, AAV-2-pre-miRNA-101 , AAV-8h, AAV-8b, AAV-h, AAV-b, AAV SM 10-2 , AAV Shuffle 100-1 , AAV Shuffle 100-3, AAV Shuffle 100-7, AAV Shuffle 10-2, AAV Shuffle 10-6, AAV Shuffle 10-8, AAV Shuffle 100-2, AAV SM 10-1, AAV SM 10-8 , AAV SM 100-3, AAV SM 100-10, BNP61 AAV, BNP62 AAV, BNP63 AAV, AAVrh.50, AAVrh.43, AAVrh.62, AAVrh.48, AAVhu.19, AAVhu.11, AAVhu.53, AAV4-8/rh.64, AAVLG-9/hu.39, AAV54.5/hu.23, AAV54.2/hu.22, AAV54.7/hu.24, AAV54.1/hu.21, AAV54.4R/hu.27, AAV46.2/hu.28, AAV46.6/hu.29, AAV128.1/hu.43, true type AAV (ttAAV), UPENN AAV 10 and/or Japanese AAV 10 serotypes, and variants thereof. As a non-limiting example, the capsid of the recombinant AAV virus is AAV2. As a non-limiting example, the capsid of the recombinant AAV virus is AAVrh10. As a non-limiting example, the capsid of the recombinant AAV virus is AAV9(hul4). As a non-limiting example, the capsid of the recombinant AAV virus is AAV-DJ. As a non-limiting example, the capsid of the recombinant AAV virus is AAV9.47. As a non-limiting example, the capsid of the recombinant AAV virus is AAV-DJ8.

[0116] In some embodiments, the AAV particles of the present invention may comprise or be derived from an AAV serotype which may be, or have, a sequence as described in United States Publication No. US20030138772, the contents of which are herein incorporated by reference in their entirety, such as, but not limited to, AAV1 (SEQ ID NO: 6 and 64 of US20030138772), AAV2 (SEQ ID NO: 7 and 70 of US20030138772), AAV3 (SEQ ID NO: 8 and 71 of US20030138772), AAV4 (SEQ ID NO: 63 of US20030138772), AAVS (SEQ ID NO: 114 of US20030138772), AAV6 (SEQ ID NO: 65 of US20030138772), AAV7 (SEQ ID NO: 1-3 of US20030138772), AAV8 (SEQ ID NO: 4 and 95 of US20030138772), AAV9 (SEQ ID NO: 5 and 100 of US20030138772), AAV10 (SEQ ID NO: 117 of US20030138772), AAV11 (SEQ ID NO: 118 of US20030138772), AAV12 (SEQ ID NO: 119 of US20030138772), AAVrh10 (amino acids 1 to 738 of SEQ ID NO: 81 of US20030138772), AAV16.3 (US20030138772 SEQ ID NO: 10), AAV29.3/bb.1 (US20030138772 SEQ ID NO: 11), AAV29.4 (US20030138772 SEQ ID NO: 12), AAV29.5/bb.2 (US20030138772 SEQ ID NO: 13), AAV1.3 (US20030138772 SEQ ID NO: 14), AAV13.3 (US20030138772 SEQ ID NO: 15), AAV24.1 (US20030138772 SEQ ID NO: 16), AAV27.3 (US20030138772 SEQ ID NO: 17), AAV7.2 (US20030138772 SEQ ID NO: 18), AAVC1 (US20030138772 SEQ ID NO: 19), AAVC3 (US20030138772 SEQ ID NO: 20), AAVCS (US20030138772 SEQ ID NO: 21), AAVF1 (US20030138772 SEQ ID NO: 22), AAVF3 (US20030138772 SEQ ID NO: 23), AAVFS (US20030138772 SEQ ID NO: 24), AAVH6 (US20030138772 SEQ ID NO: 25), AAVH2 (US20030138772 SEQ ID NO: 26), AAV42-8 (US20030138772 SEQ ID NO: 27), AAV42-15 (US20030138772 SEQ ID NO: 28), AAV42-5b (US20030138772 SEQ ID NO: 29), AAV42-lb (US20030138772 SEQ ID NO: 30), AAV42-13 (US20030138772 SEQ ID NO: 31), AAV42-3a (US20030138772 SEQ ID NO: 32), AAV42-4 (US20030138772 SEQ ID NO: 33), AAV42-5a (US20030138772 SEQ ID NO: 34), AAV42-10 (US20030138772 SEQ ID NO: 35), AAV42-3b (US20030138772 SEQ ID NO: 36), AAV42-11 (US20030138772 SEQ ID NO: 37), AAV42-6b (US20030138772 SEQ ID NO: 38), AAV43-1 (US20030138772 SEQ ID NO: 39), AAV43-5 (US20030138772 SEQ ID NO: 40), AAV43-12 (US20030138772 SEQ ID NO: 41), AAV43-20 (US20030138772 SEQ ID NO: 42), AAV43-21 (US20030138772 SEQ ID NO: 43), AAV43-23 (US20030138772 SEQ ID NO: 44), AAV43-25 (US20030138772 SEQ ID NO: 45), AAV44.1 (US20030138772 SEQ ID NO: 46), AAV44.5 (US20030138772 SEQ ID NO: 47), AAV223.1 (US20030138772 SEQ ID NO: 48), AAV223.2 (US20030138772 SEQ ID NO: 49), AAV223.4 (US20030138772 SEQ ID NO: 50), AAV223.5 (US20030138772 SEQ ID NO: 51), AAV223.6 (US20030138772 SEQ ID NO: 52), AAV223.7 (US20030138772 SEQ ID NO: 53), AAVA3.4 (US20030138772 SEQ ID NO: 54), AAVA3.5 (US20030138772 SEQ ID NO: 55), AAVA3.7 (US20030138772 SEQ ID NO: 56), AAVA3.3 (US20030138772 SEQ ID NO: 57), AAV42.12 (US20030138772 SEQ ID NO: 58), AAV44.2 (US20030138772 SEQ ID NO: 59), AAV42-2 (US20030138772 SEQ ID NO: 9), or variants thereof.

[0117] In some embodiments, the AAV particles of the present invention may comprise or be derived from AAV serotype which may be, or have, a sequence as described in United States Publication No. US20150159173, the contents of which are herein incorporated by reference in their entirety, such as, but not limited to, AAV2 (SEQ ID NO: 7 and 23 of US20150159173), rh20 (SEQ ID NO: 1 of US20150159173), rh32/33 (SEQ ID NO: 2 of US20150159173), rh39 (SEQ ID NO: 3, 20 and 36 of US20150159173), rh46 (SEQ ID NO: 4 and 22 of US20150159173), rh73 (SEQ ID NO: 5 of US20150159173), rh74 (SEQ ID NO: 6 of US20150159173), AAV6.1 (SEQ ID NO: 29 of US20150159173), rh.8 (SEQ ID NO: 41 of US20150159173), rh.48.1 (SEQ ID NO: 44 of US20150159173), hu.44 (SEQ ID NO: 45 of US20150159173), hu.29 (SEQ ID NO: 42 of US20150159173), hu.48 (SEQ ID NO: 38 of US20150159173), rh54 (SEQ ID NO: 49 of US20150159173), AAV2 (SEQ ID NO: 7 of US20150159173), cy.5 (SEQ ID NO: 8 and 24 of US20150159173), rh.10 (SEQ ID NO: 9 and 25 of US20150159173), rh.13 (SEQ ID NO: 10 and 26 of US20150159173), AAV1 (SEQ ID NO: 11 and 27 of US20150159173), AAV3 (SEQ ID NO: 12 and 28 of US20150159173), AAV6 (SEQ ID NO: 13 and 29 of US20150159173), AAV7 (SEQ ID NO: 14 and 30 of US20150159173), AAV8 (SEQ ID NO: 15 and 31 of US20150159173), hu.13 (SEQ ID NO: 16 and 32 of US20150159173), hu.26 (SEQ ID NO: 17 and 33 of US20150159173), hu.37 (SEQ ID NO: 18 and 34 of US20150159173), hu.53 (SEQ ID NO: 19 and 35 of US20150159173), rh.43 (SEQ ID NO: 21 and 37 of US20150159173), rh2 (SEQ ID NO: 39 of US20150159173), rh.37 (SEQ ID NO: 40 of US20150159173), rh.64 (SEQ ID NO: 43 of US20150159173), rh.48 (SEQ ID NO: 44 of US20150159173), ch.5 (SEQ ID NO 46 of US20150159173), rh.67 (SEQ ID NO: 47 of US20150159173), rh.58 (SEQ ID NO: 48 of US20150159173), or variants thereof including, but not limited to Cy5R1, Cy5R2, Cy5R3, Cy5R4, rh.13R, rh.37R2, rh.2R, rh.8R, rh.48.1, rh.48.2, rh.48.1.2, hu.44R1, hu.44R2, hu.44R3, hu.29R, ch.5R1, rh64R1, rh64R2, AAV6.2, AAV6.1, AAV6.12, hu.48R1, hu.48R2, and hu.48R3.

[0118] In some embodiments, the AAV particles of the present invention may comprise or be derived from AAV serotype which may be, or have, a sequence as described in U.S. Pat. No. 7,198,951, the contents of which are herein incorporated by reference in their entirety, such as, but not limited to, AAV9 (SEQ ID NO: 1-3 of U.S. Pat. No. 7,198,951), AAV2 (SEQ ID NO: 4 of U.S. Pat. No. 7,198,951), AAV1 (SEQ ID NO: 5 of U.S. Pat. No. 7,198,951), AAV3 (SEQ ID NO: 6 of U.S. Pat. No. 7,198,951), and AAV8 (SEQ ID NO: 7 of U.S. Pat. No. 7,198,951).

[0119] In some embodiments, the AAV particles of the present invention may comprise or be derived from AAV serotype which may be, or have, a mutation in the AAV9 sequence as described by N Pulicherla et al. (Molecular Therapy 19(6):1070-1078 (2011), herein incorporated by reference in its entirety), such as but not limited to, AAV9.9, AAV9.11, AAV9.13, AAV9.16, AAV9.24, AAV9.45, AAV9.47, AAV9.61, AAV9.68, AAV9.84.

[0120] In some embodiments, the AAV particles of the present invention may comprise or be derived from AAV serotype which may be, or have, a sequence as described in U.S. Pat. No. 6,156,303, the contents of which are herein incorporated by reference in their entirety, such as, but not limited to, AAV3B (SEQ ID NO: 1 and 10 of U.S. Pat. No. 6,156,303), AAV6 (SEQ ID NO: 2, 7 and 11 of U.S. Pat. No. 6,156,303), AAV2 (SEQ ID NO: 3 and 8 of U.S. Pat. No. 6,156,303), AAV3A (SEQ ID NO: 4 and 9, of U.S. Pat. No. 6,156,303), or derivatives thereof.

[0121] In some embodiments, the AAV particles of the present invention may comprise or be derived from AAV serotype which may be, or have, a sequence as described in United States Publication No. US20140359799, the contents of which are herein incorporated by reference in their entirety, such as, but not limited to, AAV8 (SEQ ID NO: 1 of US20140359799), AAVDJ (SEQ ID NO: 2 and 3 of US20140359799), or variants thereof.

[0122] In some embodiments, the AAV particle may comprise a capsid from a serotype such as, but not limited to, AAVDJ or a variant thereof, such as AAVDJ8 (or AAV-DJ8), as described by Grimm et al. (Journal of Virology 82(12): 5887-5911 (2008), herein incorporated by reference in its entirety). The amino acid sequence of AAVDJ8 may comprise two or more mutations in order to remove the heparin binding domain (HBD). As a non-limiting example, the AAV-DJ sequence described as SEQ ID NO: 1 in U.S. Pat. No. 7,588,772, the contents of which are herein incorporated by reference in their entirety, may comprise two mutations: (1) R587Q where arginine (R; Arg) at amino acid 587 is changed to glutamine (Q; Gln) and (2) R590T where arginine (R; Arg) at amino acid 590 is changed to threonine (T; Thr). As another non-limiting example, may comprise three mutations: (1) K406R where lysine (K; Lys) at amino acid 406 is changed to arginine (R; Arg), (2) R587Q where arginine (R; Arg) at amino acid 587 is changed to glutamine (Q; Gln) and (3) R590T where arginine (R; Arg) at amino acid 590 is changed to threonine (T; Thr).

[0123] In some embodiments, the AAV particles of the present invention may comprise or be derived from AAV serotype which may be, or have, a sequence of AAV4 as described in International Publication No. WO1998011244, the contents of which are herein incorporated by reference in their entirety, such as, but not limited to AAV4 (SEQ ID NO: 1-20 of WO1998011244).

[0124] In some embodiments, the AAV particles of the present invention may comprise or be derived from AAV serotype which may be, or have, a mutation in the AAV2 sequence to generate AAV2G9 as described in International Publication No. WO2014144229 and herein incorporated by reference in its entirety.

[0125] In some embodiments, the AAV particles of the present invention may comprise or be derived from AAV serotype which may be, or have, a sequence as described in International Publication No. WO2005033321, the contents of which are herein incorporated by reference in their entirety, such as, but not limited to AAV3-3 (SEQ ID NO: 217 of WO2005033321), AAV1 (SEQ ID NO: 219 and 202 of WO2005033321), AAV106.1/hu.37 (SEQ ID No: 10 of WO2005033321), AAV114.3/hu.40 (SEQ ID No: 11 of WO2005033321), AAV127.2/hu.41 (SEQ ID NO:6 and 8 of WO2005033321), AAV128.3/hu.44 (SEQ ID No: 81 of WO2005033321), AAV130.4/hu.48 (SEQ ID NO: 78 of WO2005033321), AAV145.1/hu.53 (SEQ ID No: 176 and 177 of WO2005033321), AAV145.6/hu.56 (SEQ ID NO: 168 and 192 of WO2005033321), AAV16.12/hu.11 (SEQ ID NO: 153 and 57 of WO2005033321), AAV16.8/hu.10 (SEQ ID NO: 156 and 56 of WO2005033321), AAV161.10/hu.60 (SEQ ID No: 170 of WO2005033321), AAV161.6/hu.61 (SEQ ID No: 174 of WO2005033321), AAV1-7/rh.48 (SEQ ID NO: 32 of WO2005033321), AAV1-8/rh.49 (SEQ ID NOs: 103 and 25 of WO2005033321), AAV2 (SEQ ID NO: 211 and 221 of WO2005033321), AAV2-15/rh.62 (SEQ ID No: 33 and 114 of WO2005033321), AAV2-3/rh.61 (SEQ ID NO: 21 of WO2005033321), AAV2-4/rh.50 (SEQ ID No: 23 and 108 of WO2005033321), AAV2-5/rh.51 (SEQ ID NO: 104 and 22 of WO2005033321), AAV3.1/hu.6 (SEQ ID NO: 5 and 84 of WO2005033321), AAV3.1/hu.9 (SEQ ID NO: 155 and 58 of WO2005033321), AAV3-11/rh.53 (SEQ ID NO: 186 and 176 of WO2005033321), AAV3-3 (SEQ ID NO: 200 of WO2005033321), AAV33.12/hu.17 (SEQ ID NO:4 of WO2005033321), AAV33.4/hu.15 (SEQ ID No: 50 of WO2005033321), AAV33.8/hu.16 (SEQ ID No: 51 of WO2005033321), AAV3-9/rh.52 (SEQ ID NO: 96 and 18 of WO2005033321), AAV4-19/rh.55 (SEQ ID NO: 117 of WO2005033321), AAV4-4 (SEQ ID NO: 201 and 218 of WO2005033321), AAV4-9/rh.54 (SEQ ID NO: 116 of WO2005033321), AAVS (SEQ ID NO: 199 and 216 of WO2005033321), AAV52.1/hu.20 (SEQ ID NO: 63 of WO2005033321), AAV52/hu.19 (SEQ ID NO: 133 of WO2005033321), AAVS-22/rh.58 (SEQ ID No: 27 of WO2005033321), AAVS-3/rh.57 (SEQ ID NO: 105 of WO2005033321), AAVS-3/rh.57 (SEQ ID No: 26 of WO2005033321), AAV58.2/hu.25 (SEQ ID No: 49 of WO2005033321), AAV6 (SEQ ID NO: 203 and 220 of WO2005033321), AAV7 (SEQ ID NO: 222 and 213 of WO2005033321), AAV7.3/hu.7 (SEQ ID No: 55 of WO2005033321), AAV8 (SEQ ID NO: 223 and 214 of WO2005033321), AAVH-1/hu.1 (SEQ ID No: 46 of WO2005033321), AAVH-5/hu.3 (SEQ ID No: 44 of WO2005033321), AAVhu.1 (SEQ ID NO: 144 of WO2005033321), AAVhu.10 (SEQ ID NO: 156 of WO2005033321), AAVhu.11 (SEQ ID NO: 153 of WO2005033321), AAVhu.12 (WO2005033321 SEQ ID NO: 59), AAVhu.13 (SEQ ID NO: 129 of WO2005033321), AAVhu.14/AAV9 (SEQ ID NO: 123 and 3 of WO2005033321), AAVhu.15 (SEQ ID NO: 147 of WO2005033321), AAVhu.16 (SEQ ID NO: 148 of WO2005033321), AAVhu.17 (SEQ ID NO: 83 of WO2005033321), AAVhu.18 (SEQ ID NO: 149 of WO2005033321), AAVhu.19 (SEQ ID NO: 133 of WO2005033321), AAVhu.2 (SEQ ID NO: 143 of WO2005033321), AAVhu.20 (SEQ ID NO: 134 of WO2005033321), AAVhu.21 (SEQ ID NO: 135 of WO2005033321), AAVhu.22 (SEQ ID NO: 138 of WO2005033321), AAVhu.23.2 (SEQ ID NO: 137 of WO2005033321), AAVhu.24 (SEQ ID NO: 136 of WO2005033321), AAVhu.25 (SEQ ID NO: 146 of WO2005033321), AAVhu.27 (SEQ ID NO: 140 of WO2005033321), AAVhu.29 (SEQ ID NO: 132 of WO2005033321), AAVhu.3 (SEQ ID NO: 145 of WO2005033321), AAVhu.31 (SEQ ID NO: 121 of WO2005033321), AAVhu.32 (SEQ ID NO: 122 of WO2005033321), AAVhu.34 (SEQ ID NO: 125 of WO2005033321), AAVhu.35 (SEQ ID NO: 164 of WO2005033321), AAVhu.37 (SEQ ID NO: 88 of WO2005033321), AAVhu.39 (SEQ ID NO: 102 of WO2005033321), AAVhu.4 (SEQ ID NO: 141 of WO2005033321), AAVhu.40 (SEQ ID NO: 87 of WO2005033321), AAVhu.41 (SEQ ID NO: 91 of WO2005033321), AAVhu.42 (SEQ ID NO: 85 of WO2005033321), AAVhu.43 (SEQ ID NO: 160 of WO2005033321), AAVhu.44 (SEQ ID NO: 144 of WO2005033321), AAVhu.45 (SEQ ID NO: 127 of WO2005033321), AAVhu.46 (SEQ ID NO: 159 of WO2005033321), AAVhu.47 (SEQ ID NO: 128 of WO2005033321), AAVhu.48 (SEQ ID NO: 157 of WO2005033321), AAVhu.49 (SEQ ID NO: 189 of WO2005033321), AAVhu.51 (SEQ ID NO: 190 of WO2005033321), AAVhu.52 (SEQ ID NO: 191 of WO2005033321), AAVhu.53 (SEQ ID NO: 186 of WO2005033321), AAVhu.54 (SEQ ID NO: 188 of WO2005033321), AAVhu.55 (SEQ ID NO: 187 of WO2005033321), AAVhu.56 (SEQ ID NO: 192 of WO2005033321), AAVhu.57 (SEQ ID NO: 193 of WO2005033321), AAVhu.58 (SEQ ID NO: 194 of WO2005033321), AAVhu.6 (SEQ ID NO: 84 of WO2005033321), AAVhu.60 (SEQ ID NO: 184 of WO2005033321), AAVhu.61 (SEQ ID NO: 185 of WO2005033321), AAVhu.63 (SEQ ID NO: 195 of WO2005033321), AAVhu.64 (SEQ ID NO: 196 of WO2005033321), AAVhu.66 (SEQ ID NO: 197 of WO2005033321), AAVhu.67 (SEQ ID NO: 198 of WO2005033321), AAVhu.7 (SEQ ID NO: 150 of WO2005033321), AAVhu.8 (WO2005033321 SEQ ID NO: 12), AAVhu.9 (SEQ ID NO: 155 of WO2005033321), AAVLG-10/rh.40 (SEQ ID No: 14 of WO2005033321), AAVLG-4/rh.38 (SEQ ID NO: 86 of WO2005033321), AAVLG-4/rh.38 (SEQ ID No: 7 of WO2005033321), AAVN721-8/rh.43 (SEQ ID NO: 163 of WO2005033321), AAVN721-8/rh.43 (SEQ ID No: 43 of WO2005033321), AAVpi.1 (WO2005033321 SEQ ID NO: 28), AAVpi.2 (WO2005033321 SEQ ID NO: 30), AAVpi.3 (WO2005033321 SEQ ID NO: 29), AAVrh.38 (SEQ ID NO: 86 of WO2005033321), AAVrh.40 (SEQ ID NO: 92 of WO2005033321), AAVrh.43 (SEQ ID NO: 163 of WO2005033321), AAVrh.44 (WO2005033321 SEQ ID NO: 34), AAVrh.45 (WO2005033321 SEQ ID NO: 41), AAVrh.47 (WO2005033321 SEQ ID NO: 38), AAVrh.48 (SEQ ID NO: 115 of WO2005033321), AAVrh.49 (SEQ ID NO: 103 of WO2005033321), AAVrh.50 (SEQ ID NO: 108 of WO2005033321), AAVrh.51 (SEQ ID NO: 104 of WO2005033321), AAVrh.52 (SEQ ID NO: 96 of WO2005033321), AAVrh.53 (SEQ ID NO: 97 of WO2005033321), AAVrh.55 (WO2005033321 SEQ ID NO: 37), AAVrh.56 (SEQ ID NO: 152 of WO2005033321), AAVrh.57 (SEQ ID NO: 105 of WO2005033321), AAVrh.58 (SEQ ID NO: 106 of WO2005033321), AAVrh.59 (WO2005033321 SEQ ID NO: 42), AAVrh.60 (WO2005033321 SEQ ID NO: 31), AAVrh.61 (SEQ ID NO: 107 of WO2005033321), AAVrh.62 (SEQ ID NO: 114 of WO2005033321), AAVrh.64 (SEQ ID NO: 99 of WO2005033321), AAVrh.65 (WO2005033321 SEQ ID NO: 35), AAVrh.68 (WO2005033321 SEQ ID NO: 16), AAVrh.69 (WO2005033321 SEQ ID NO: 39), AAVrh.70 (WO2005033321 SEQ ID NO: 20), AAVrh.72 (WO2005033321 SEQ ID NO: 9), or variants thereof including, but not limited to, AAVcy.2, AAVcy.3, AAVcy.4, AAVcy.5, AAVcy.6, AAVrh.12, AAVrh.17, AAVrh.18, AAVrh.19, AAVrh.21, AAVrh.22, AAVrh.23, AAVrh.24, AAVrh.25, AAVrh.25/42 15, AAVrh.31, AAVrh.32, AAVrh.33, AAVrh.34, AAVrh.35, AAVrh.36, AAVrh.37, AAVrh14. Non limiting examples of variants include SEQ ID NO: 13, 15, 17, 19, 24, 36, 40, 45, 47, 48, 51-54, 60-62, 64-77, 79, 80, 82, 89, 90, 93-95, 98, 100, 101-109-113, 118-120, 124, 126, 131, 139, 142, 151,154, 158, 161, 162, 165-183, 202, 204-212, 215, 219, 224-236, of WO2005033321, the contents of which are herein incorporated by reference in their entirety.

[0126] In some embodiments, the AAV particles of the present invention may comprise or be derived from AAV serotype which may be, or have, a sequence as described in International Publication No. WO2015168666, the contents of which are herein incorporated by reference in their entirety, such as, but not limited to, AAVrh8R (SEQ ID NO: 9 of WO2015168666), AAVrh8R A586R mutant (SEQ ID NO: 10 of WO2015168666), AAVrh8R R533A mutant (SEQ ID NO: 11 of WO2015168666), or variants thereof.

[0127] In some embodiments, the AAV particles of the present invention may comprise or be derived from AAV serotype which may be, or have, a sequence as described in U.S. Pat. No. 9,233,131, the contents of which are herein incorporated by reference in their entirety, such as, but not limited to, AAVhE1.1 (SEQ ID NO:44 of US9233131), AAVhEr1.5 (SEQ ID NO:45 of U.S. Pat. No. 9,233,131), AAVhER1.14 (SEQ ID NO:46 of U.S. Pat. No. 9,233,131), AAVhEr1.8 (SEQ ID NO:47 of U.S. Pat. No. 9,233,131), AAVhEr1.16 (SEQ ID NO:48 of U.S. Pat. No. 9,233,131), AAVhEr1.18 (SEQ ID NO:49 of U.S. Pat. No. 9,233,131), AAVhEr1.35 (SEQ ID NO:50 of U.S. Pat. No. 9,233,131), AAVhEr1.7 (SEQ ID NO:51 of U.S. Pat. No. 9,233,131), AAVhEr1.36 (SEQ ID NO:52 of U.S. Pat. No. 9,233,131), AAVhEr2.29 (SEQ ID NO:53 of U.S. Pat. No. 9,233,131), AAVhEr2.4 (SEQ ID NO:54 of U.S. Pat. No. 9,233,131), AAVhEr2.16 (SEQ ID NO:55 of U.S. Pat. No. 9,233,131), AAVhEr2.30 (SEQ ID NO:56 of U.S. Pat. No. 9,233,131), AAVhEr2.31 (SEQ ID NO:58 of U.S. Pat. No. 9,233,131), AAVhEr2.36 (SEQ ID NO:57 of U.S. Pat. No. 9,233,131), AAVhER1.23 (SEQ ID NO:53 of U.S. Pat. No. 9,233,131), AAVhEr3.1 (SEQ ID NO:59 of U.S. Pat. No. 9,233,131), AAV2.5T (SEQ ID NO:42 of U.S. Pat. No. 9,233,131), or variants thereof.

[0128] In some embodiments, the AAV particles of the present invention may comprise or be derived from AAV serotype which may be, or have, a sequence as described in United States Patent Publication No. US20150376607, the contents of which are herein incorporated by reference in their entirety, such as, but not limited to, AAV-PAEC (SEQ ID NO:1 of US20150376607), AAV-LK01 (SEQ ID NO:2 of US20150376607), AAV-LK02 (SEQ ID NO:3 of US20150376607), AAV-LK03 (SEQ ID NO:4 of US20150376607), AAV-LK04 (SEQ ID NO:5 of US20150376607), AAV-LK05 (SEQ ID NO:6 of US20150376607), AAV-LK06 (SEQ ID NO:7 of US20150376607), AAV-LK07 (SEQ ID NO:8 of US20150376607), AAV-LK08 (SEQ ID NO:9 of US20150376607), AAV-LK09 (SEQ ID NO:10 of US20150376607), AAV-LK10 (SEQ ID NO:11 of US20150376607), AAV-LK11 (SEQ ID NO:12 of US20150376607), AAV-LK12 (SEQ ID NO:13 of US20150376607), AAV-LK13 (SEQ ID NO:14 of US20150376607), AAV-LK14 (SEQ ID NO:15 of US20150376607), AAV-LK15 (SEQ ID NO:16 of US20150376607), AAV-LK16 (SEQ ID NO:17 of US20150376607), AAV-LK17 (SEQ ID NO:18 of US20150376607), AAV-LK18 (SEQ ID NO:19 of US20150376607), AAV-LK19 (SEQ ID NO:20 of US20150376607), AAV-PAEC2 (SEQ ID NO:21 of US20150376607), AAV-PAEC4 (SEQ ID NO:22 of US20150376607), AAV-PAEC6 (SEQ ID NO:23 of US20150376607), AAV-PAEC7 (SEQ ID NO:24 of US20150376607), AAV-PAEC8 (SEQ ID NO:25 of US20150376607), AAV-PAEC11 (SEQ ID NO:26 of US20150376607), AAV-PAEC12 (SEQ ID NO:27, of US20150376607), or variants thereof.

[0129] In some embodiments, the AAV particles of the present invention may comprise or be derived from AAV serotype which may be, or have, a sequence as described in U.S. Pat. No. 9,163,261, the contents of which are herein incorporated by reference in their entirety, such as, but not limited to, AAV-2-pre-miRNA-101 (SEQ ID NO: 1 U.S. Pat. No. 9,163,261), or variants thereof.

[0130] In some embodiments, the AAV particles of the present invention may comprise or be derived from AAV serotype which may be, or have, a sequence as described in United States Patent Publication No. US20150376240, the contents of which are herein incorporated by reference in their entirety, such as, but not limited to, AAV-8h (SEQ ID NO: 6 of US20150376240), AAV-8b (SEQ ID NO: 5 of US20150376240), AAV-h (SEQ ID NO: 2 of US20150376240), AAV-b (SEQ ID NO: 1 of US20150376240), or variants thereof.

[0131] In some embodiments, the AAV particles of the present invention may comprise or be derived from AAV serotype which may be, or have, a sequence as described in United States Patent Publication No. US20160017295, the contents of which are herein incorporated by reference in their entirety, such as, but not limited to, AAV SM 10-2 (SEQ ID NO: 22 of US20160017295), AAV Shuffle 100-1 (SEQ ID NO: 23 of US20160017295), AAV Shuffle 100-3 (SEQ ID NO: 24 of US20160017295), AAV Shuffle 100-7 (SEQ ID NO: 25 of US20160017295), AAV Shuffle 10-2 (SEQ ID NO: 34 of US20160017295), AAV Shuffle 10-6 (SEQ ID NO: 35 of US20160017295), AAV Shuffle 10-8 (SEQ ID NO: 36 of US20160017295), AAV Shuffle 100-2 (SEQ ID NO: 37 of US20160017295), AAV SM 10-1 (SEQ ID NO: 38 of US20160017295), AAV SM 10-8 (SEQ ID NO: 39 of US20160017295), AAV SM 100-3 (SEQ ID NO: 40 of US20160017295), AAV SM 100-10 (SEQ ID NO: 41 of US20160017295), or variants thereof.

[0132] In some embodiments, the AAV particles of the present invention may comprise or be derived from AAV serotype which may be, or have, a sequence as described in United States Patent Publication No. US20150238550, the contents of which are herein incorporated by reference in their entirety, such as, but not limited to, BNP61 AAV (SEQ ID NO: 1 of US20150238550), BNP62 AAV (SEQ ID NO: 3 of US20150238550), BNP63 AAV (SEQ ID NO: 4 of US20150238550), or variants thereof

[0133] In some embodiments, the AAV particles of the present invention may comprise or be derived from an AAV serotype which may be or may have a sequence as described in United States Patent Publication No. US20150315612, the contents of which are herein incorporated by reference in their entirety, such as, but not limited to, AAVrh.50 (SEQ ID NO: 108 of US20150315612), AAVrh.43 (SEQ ID NO: 163 of US20150315612), AAVrh.62 (SEQ ID NO: 114 of US20150315612), AAVrh.48 (SEQ ID NO: 115 of US20150315612), AAVhu.19 (SEQ ID NO: 133 of US20150315612), AAVhu.11 (SEQ ID NO: 153 of US20150315612), AAVhu.53 (SEQ ID NO: 186 of US20150315612), AAV4-8/rh.64 (SEQ ID No: 15 of US20150315612), AAVLG-9/hu.39 (SEQ ID No: 24 of US20150315612), AAV54.5/hu.23 (SEQ ID No: 60 of US20150315612), AAV54.2/hu.22 (SEQ ID No: 67 of US20150315612), AAV54.7/hu.24 (SEQ ID No: 66 of US20150315612), AAV54.1/hu.21 (SEQ ID No: 65 of US20150315612), AAV54.4R/hu.27 (SEQ ID No: 64 of US20150315612), AAV46.2/hu.28 (SEQ ID No: 68 of US20150315612), AAV46.6/hu.29 (SEQ ID No: 69 of US20150315612), AAV128.1/hu.43 (SEQ ID No: 80 of US20150315612), or variants thereof

[0134] In some embodiments, the AAV particles of the present invention may comprise or be derived from AAV serotype which may be, or have, a sequence as described in International Publication No. WO2015121501, the contents of which are herein incorporated by reference in their entirety, such as, but not limited to, true type AAV (ttAAV) (SEQ ID NO: 2 of WO2015121501), “UPenn AAV10” (SEQ ID NO: 8 of WO2015121501), “Japanese AAV10” (SEQ ID NO: 9 of WO2015121501), or variants thereof.

[0135] According to the present invention, the AAV particle may comprise an AAV capsid serotype which may be selected from or derived from a variety of species. In one embodiment, the AAV may be an avian AAV (AAAV). The AAAV serotype may be, or have, a sequence as described in U.S. Pat. No. 9,238,800, the contents of which are herein incorporated by reference in their entirety, such as, but not limited to, AAAV (SEQ ID NO: 1, 2, 4, 6, 8, 10, 12, and 14 of U.S. Pat. No. 9,238,800), or variants thereof.

[0136] In one embodiment, the AAV particle may comprise an AAV capsid serotype which may be or derived from a bovine AAV (BAAV). The BAAV serotype may be, or have, a sequence as described in U.S. Pat. No. 9,193,769, the contents of which are herein incorporated by reference in their entirety, such as, but not limited to, BAAV (SEQ ID NO: 1 and 6 of U.S. Pat. No. 9,193,769), or variants thereof. The BAAV serotype may be or have a sequence as described in U.S. Pat. No. 7,427,396, the contents of which are herein incorporated by reference in their entirety, such as, but not limited to, BAAV (SEQ ID NO: 5 and 6 of U.S. Pat. No. 7,427,396), or variants thereof.

[0137] In one embodiment, the AAV particle may comprise an AAV capsid serotype which may be or derived from a caprine AAV. The caprine AAV serotype may be, or have, a sequence as described in U.S. Pat. No. 7,427,396, the contents of which are herein incorporated by reference in their entirety, such as, but not limited to, caprine AAV (SEQ ID NO: 3 of U.S. Pat. No. 7,427,396), or variants thereof.

[0138] In other embodiments, the AAV particle may comprise an AAV capsid serotype which may be engineered as a hybrid AAV from two or more parental serotypes. In one embodiment, the AAV may be AAV2G9 which comprises sequences from AAV2 and AAV9. The AAV2G9 AAV serotype may be, or have, a sequence as described in United States Patent Publication No. US20160017005, the contents of which are herein incorporated by reference in its entirety.

[0139] In one embodiment, the AAV particle may comprise an AAV capsid serotype which may be generated by the AAV9 capsid library with mutations in amino acids 390-627 (VP1 numbering) as described by Pulicherla et al. (Molecular Therapy 19(6):1070-1078 (2011), the contents of which are herein incorporated by reference in their entirety. The serotype and corresponding nucleotide and amino acid substitutions may be, but is not limited to, AAV9.1 (G1594C; D532H), AAV6.2 (T1418A and T1436X; V473D and I479K), AAV9.3 (T1238A; F413Y), AAV9.4 (T1250C and A1617T; F417S), AAV9.5 (A1235G, A1314T, A1642G, C1760T; Q412R, T548A, A587V), AAV9.6 (T1231A; F4111), AAV9.9 (G1203A, G1785T; W595C), AAV9.10 (A1500G, T1676C; M559T), AAV9.11 (A1425T, A1702C, A1769T; T568P, Q590L), AAV9.13 (A1369C, A1720T; N457H, T574S), AAV9.14 (T1340A, T1362C, T1560C, G1713A; L447H), AAV9.16 (A1775T; Q592L), AAV9.24 (T1507C, T1521G; W503R), AAV9.26 (A1337G, A1769C; Y446C, Q590P), AAV9.33 (A1667C; D556A), AAV9.34 (A1534G, C1794T; N512D), AAV9.35 (A1289T, T1450A, C1494T, A1515T, C1794A, G1816A; Q430L, Y484N, N98K, V6061), AAV9.40 (A1694T, E565V), AAV9.41 (A1348T, T1362C; T450S), AAV9.44 (A1684C, A1701T, A1737G; N562H, K567N), AAV9.45 (A1492T, C1804T; N498Y, L602F), AAV9.46 (G1441C, T1525C, T1549G; G481R, W509R, L517V), 9.47 (G1241A, G1358A, A1669G, C1745T; S414N, G453D, K557E, T5821), AAV9.48 (C1445T, A1736T; P482L, Q579L), AAV9.50 (A1638T, C1683T, T1805A; Q546H, L602H), AAV9.53 (G1301A, A1405C, C1664T, G1811T; R134Q, 5469R, A555V, G604V), AAV9.54 (C1531A, T1609A; L5111, L537M), AAV9.55 (T1605A; F535L), AAV9.58 (C1475T, C1579A; T4921, H527N), AAV.59 (T1336C; Y446H), AAV9.61 (A1493T; N4981), AAV9.64 (C1531A, A1617T; L5111), AAV9.65 (C1335T, T1530C, C1568A; A523D), AAV9.68 (C1510A; P504T), AAV9.80 (G1441A,;G481R), AAV9.83 (C1402A, A1500T; P468T, E500D), AAV9.87 (T1464C, T1468C; S490P), AAV9.90 (A1196T; Y399F), AAV9.91 (T1316G, A1583T, C1782G, T1806C; L439R, K528I), AAV9.93 (A1273G, A1421G, A1638C, C1712T, G1732A, A1744T, A1832T; S425G, Q474R, Q546H, P571L, G578R, T582S, D611V), AAV9.94 (A1675T; M559L) and AAV9.95 (T1605A; F535L).

[0140] In one embodiment, the AAV particle of the present invention may have an AAV9 variant capsid serotype (AAV Clade F) as described in International Publication WO2016049230, the contents of which are herein incorporated by reference in their entirety.

[0141] In one embodiment the AAV particle of the present invention may have an AAV2g9 capsid as described in Murlidharan et al (CNS-restricted transduction and CRISPR/Cas9-mediated gene deletion with an engineered AAV vector; Molecular Therapy Nucleic Acids 5, e338; published online July 19, 2016), the contents of which are herein incorporated by reference in their entirety. This capsid variant comprises an exchange of the amino acid residues of the AAV9 capsid required for galactose binding for the corresponding amino acids of the AAV2 capsid (Q464V, A467P, D469N, I470M, R471A, D472V, S474G, Y500F, and S501A). Further, the viral genome of the AAV may comprise one or more gRNAs targeting a microRNA (e.g., MIR137) as described for treatment of any disease or disorder. In one embodiment the disease to be treated is schizophrenia.

[0142] In one embodiment, the AAV particle may comprise an AAV capsid serotype which may be a serotype comprising at least one AAV capsid CD8+ T-cell epitope. As a non-limiting example, the serotype may be AAV1, AAV2 or AAV8.

[0143] In one embodiment, the AAV particle may comprise an AAV capsid serotype which may be a serotype selected from any of those found in Table 3.

[0144] In one embodiment, the AAV particle may comprise an AAV capsid serotype which may comprise a sequence, fragment or variant thereof, of the sequences in Table 3.

[0145] In one embodiment, the AAV particle may comprise an AAV capsid serotype which may be encoded by a sequence, fragment or variant as described in Table 3.

TABLE 3.
AAV Serotypes

| | SEQ | |
|---|---|---|
| Serotype | ID NO | Reference Information |
| AAV1 | 1 | US20150159173 SEQ ID NO: 11, US20150315612 SEQ ID NO: 202 |
| AAV1 | 2 | US20160017295 SEQ ID NO: 1, US20030138772 SEQ ID NO: 64, |
| | | US20150159173 SEQ ID NO: 27, US20150315612 SEQ ID NO: 219, |
| | | U.S. Pat. No. 7,198,951 SEQ ID NO: 5 |
| AAV1 | 3 | US20030138772 SEQ ID NO: 6 |
| AAV1.3 | 4 | US20030138772 SEQ ID NO: 14 |
| AAV10 | 5 | US20030138772 SEQ ID NO: 117 |
| AAV10 | 6 | WO2015121501 SEQ ID NO: 9 |
| AAV10 | 7 | WO2015121501 SEQ ID NO: 8 |
| AAV11 | 8 | US20030138772 SEQ ID NO: 118 |
| AAV12 | 9 | US20030138772 SEQ ID NO: 119 |
| AAV2 | 10 | US20150159173 SEQ ID NO: 7, US20150315612 SEQ ID NO: 211 |
| AAV2 | 11 | US20030138772 SEQ ID NO: 70, US20150159173 SEQ ID NO: 23, |
| | | US20150315612 SEQ ID NO: 221, US20160017295 SEQ ID NO: 2, |
| | | U.S. Pat. No. 6,156,303 SEQ ID NO: 4, U.S. Pat. No. 7,198,951 SEQ ID NO: 4, |
| | | WO2015121501 SEQ ID NO: 1 |
| AAV2 | 12 | U.S. Pat. No. 6,156,303 SEQ ID NO: 8 |
| AAV2 | 13 | US20030138772 SEQ ID NO: 7 |
| AAV2 | 14 | U.S. Pat. No. 6,156,303 SEQ ID NO: 3 |
| AAV2.5T | 15 | U.S. Pat. No. 9,233,131 SEQ ID NO: 42 |
| AAV223.10 | 16 | US20030138772 SEQ ID NO: 75 |
| AAV223.2 | 17 | US20030138772 SEQ ID NO: 49 |
| AAV223.2 | 18 | US20030138772 SEQ ID NO: 76 |
| AAV223.4 | 19 | US20030138772 SEQ ID NO: 50 |
| AAV223.4 | 20 | US20030138772 SEQ ID NO: 73 |
| AAV223.5 | 21 | US20030138772 SEQ ID NO: 51 |
| AAV223.5 | 22 | US20030138772 SEQ ID NO: 74 |
| AAV223.6 | 23 | US20030138772 SEQ ID NO: 52 |
| AAV223.6 | 24 | US20030138772 SEQ ID NO: 78 |
| AAV223.7 | 25 | US20030138772 SEQ ID NO: 53 |
| AAV223.7 | 26 | US20030138772 SEQ ID NO: 77 |
| AAV29.3 | 27 | US20030138772 SEQ ID NO: 82 |
| AAV29.4 | 28 | US20030138772 SEQ ID NO: 12 |
| AAV29.5 | 29 | US20030138772 SEQ ID NO: 83 |
| AAV29.5 (AAVbb.2) | 30 | US20030138772 SEQ ID NO: 13 |
| AAV3 | 31 | US20150159173 SEQ ID NO: 12 |
| AAV3 | 32 | US20030138772 SEQ ID NO: 71, US20150159173 SEQ ID NO: 28, |
| | | US20160017295 SEQ ID NO: 3, U.S. Pat. No. 7,198,951 SEQ ID NO: 6 |
| AAV3 | 33 | US20030138772 SEQ ID NO: 8 |
| AAV3.3b | 34 | US20030138772 SEQ ID NO: 72 |
| AAV3-3 | 35 | US20150315612 SEQ ID NO: 200 |
| AAV3-3 | 36 | US20150315612 SEQ ID NO: 217 |
| AAV3a | 37 | U.S. Pat. No. 6,156,303 SEQ ID NO: 5 |
| AAV3a | 38 | U.S. Pat. No. 6,156,303 SEQ ID NO: 9 |
| AAV3b | 39 | U.S. Pat. No. 6,156,303 SEQ ID NO: 6 |
| AAV3b | 40 | U.S. Pat. No. 6,156,303 SEQ ID NO: 10 |
| AAV3b | 41 | U.S. Pat. No. 6,156,303 SEQ ID NO: 1 |
| AAV4 | 42 | US20140348794 SEQ ID NO: 17 |
| AAV4 | 43 | US20140348794 SEQ ID NO: 5 |
| AAV4 | 44 | US20140348794 SEQ ID NO: 3 |
| AAV4 | 45 | US20140348794 SEQ ID NO: 14 |
| AAV4 | 46 | US20140348794 SEQ ID NO: 15 |
| AAV4 | 47 | US20140348794 SEQ ID NO: 19 |
| AAV4 | 48 | US20140348794 SEQ ID NO: 12 |
| AAV4 | 49 | US20140348794 SEQ ID NO: 13 |
| AAV4 | 50 | US20140348794 SEQ ID NO: 7 |
| AAV4 | 51 | US20140348794 SEQ ID NO: 8 |
| AAV4 | 52 | US20140348794 SEQ ID NO: 9 |
| AAV4 | 53 | US20140348794 SEQ ID NO: 2 |
| AAV4 | 54 | US20140348794 SEQ ID NO: 10 |
| AAV4 | 55 | US20140348794 SEQ ID NO: 11 |
| AAV4 | 56 | US20140348794 SEQ ID NO: 18 |
| AAV4 | 57 | US20030138772 SEQ ID NO: 63, US20160017295 SEQ ID NO: 4, |
| | | US20140348794 SEQ ID NO: 4 |
| AAV4 | 58 | US20140348794 SEQ ID NO: 16 |
| AAV4 | 59 | US20140348794 SEQ ID NO: 20 |
| AAV4 | 60 | US20140348794 SEQ ID NO: 6 |
| AAV4 | 61 | US20140348794 SEQ ID NO: 1 |
| AAV42.2 | 62 | US20030138772 SEQ ID NO: 9 |
| AAV42.2 | 63 | US20030138772 SEQ ID NO: 102 |
| AAV42.3b | 64 | US20030138772 SEQ ID NO: 36 |
| AAV42.3B | 65 | US20030138772 SEQ ID NO: 107 |
| AAV42.4 | 66 | US20030138772 SEQ ID NO: 33 |
| AAV42.4 | 67 | US20030138772 SEQ ID NO: 88 |
| AAV42.8 | 68 | US20030138772 SEQ ID NO: 27 |
| AAV42.8 | 69 | US20030138772 SEQ ID NO: 85 |
| AAV43.1 | 70 | US20030138772 SEQ ID NO: 39 |
| AAV43.1 | 71 | US20030138772 SEQ ID NO: 92 |
| AAV43.12 | 72 | US20030138772 SEQ ID NO: 41 |
| AAV43.12 | 73 | US20030138772 SEQ ID NO: 93 |
| AAV43.20 | 74 | US20030138772 SEQ ID NO: 42 |
| AAV43.20 | 75 | US20030138772 SEQ ID NO: 99 |
| AAV43.21 | 76 | US20030138772 SEQ ID NO: 43 |
| AAV43.21 | 77 | US20030138772 SEQ ID NO: 96 |
| AAV43.23 | 78 | US20030138772 SEQ ID NO: 44 |
| AAV43.23 | 79 | US20030138772 SEQ ID NO: 98 |
| AAV43.25 | 80 | US20030138772 SEQ ID NO: 45 |
| AAV43.25 | 81 | US20030138772 SEQ ID NO: 97 |
| AAV43.5 | 82 | US20030138772 SEQ ID NO: 40 |
| AAV43.5 | 83 | US20030138772 SEQ ID NO: 94 |
| AAV4-4 | 84 | US20150315612 SEQ ID NO: 201 |
| AAV4-4 | 85 | US20150315612 SEQ ID NO: 218 |
| AAV44.1 | 86 | US20030138772 SEQ ID NO: 46 |
| AAV44.1 | 87 | US20030138772 SEQ ID NO: 79 |
| AAV44.5 | 88 | US20030138772 SEQ ID NO: 47 |
| AAV44.5 | 89 | US20030138772 SEQ ID NO: 80 |
| AAV4407 | 90 | US20150315612 SEQ ID NO: 90 |
| AAV5 | 91 | U.S. Pat. No. 7,427,396 SEQ ID NO: 1 |
| AAV5 | 92 | US20030138772 SEQ ID NO: 114 |
| AAV5 | 93 | US20160017295 SEQ ID NO: 5, U.S. Pat. No. 7,427,396 SEQ ID NO: 2, |
| | | US20150315612 SEQ ID NO: 216 |
| AAV5 | 94 | US20150315612 SEQ ID NO: 199 |
| AAV6 | 95 | US20150159173 SEQ ID NO: 13 |
| AAV6 | 96 | US20030138772 SEQ ID NO: 65, US20150159173 SEQ ID NO: 29, |
| | | US20160017295 SEQ ID NO: 6, U.S. Pat. No. 6,156,303 SEQ ID NO: 7 |
| AAV6 | 97 | U.S. Pat. No. 6,156,303 SEQ ID NO: 11 |
| AAV6 | 98 | U.S. Pat. No. 6,156,303 SEQ ID NO: 2 |
| AAV6 | 99 | US20150315612 SEQ ID NO: 203 |
| AAV6 | 100 | US20150315612 SEQ ID NO: 220 |
| AAV6.1 | 101 | US20150159173 |
| AAV6.12 | 102 | US20150159173 |
| AAV6.2 | 103 | US20150159173 |
| AAV7 | 104 | US20150159173 SEQ ID NO: 14 |
| AAV7 | 105 | US20150315612 SEQ ID NO: 183 |
| AAV7 | 106 | US20030138772 SEQ ID NO: 2, US20150159173 SEQ ID NO: 30, |
| | | US20150315612 SEQ ID NO: 181, US20160017295 SEQ ID NO: 7 |
| AAV7 | 107 | US20030138772 SEQ ID NO: 3 |
| AAV7 | 108 | US20030138772 SEQ ID NO: 1, US20150315612 SEQ ID NO: 180 |
| AAV7 | 109 | US20150315612 SEQ ID NO: 213 |
| AAV7 | 110 | US20150315612 SEQ ID NO: 222 |
| AAV8 | 111 | US20150159173 SEQ ID NO: 15 |
| AAV8 | 112 | US20150376240 SEQ ID NO: 7 |
| AAV8 | 113 | US20030138772 SEQ ID NO: 4, US20150315612 SEQ ID NO: 182 |
| AAV8 | 114 | US20030138772 SEQ ID NO: 95, US20140359799 SEQ ID NO: 1, |
| | | US20150159173 SEQ ID NO: 31, US20160017295 SEQ ID NO: 8, |
| | | U.S. Pat. No. 7,198,951 SEQ ID NO: 7, US20150315612 SEQ ID NO: 223 |
| AAV8 | 115 | US20150376240 SEQ ID NO: 8 |
| AAV8 | 116 | US20150315612 SEQ ID NO: 214 |
| AAV-8b | 117 | US20150376240 SEQ ID NO: 5 |
| AAV-8b | 118 | US20150376240 SEQ ID NO: 3 |
| AAV-8h | 119 | US20150376240 SEQ ID NO: 6 |
| AAV-8h | 120 | US20150376240 SEQ ID NO: 4 |
| AAV9 | 121 | US20030138772 SEQ ID NO: 5 |
| AAV9 | 122 | U.S. Pat. No. 7,198,951 SEQ ID NO: 1 |
| AAV9 | 123 | US20160017295 SEQ ID NO: 9 |
| AAV9 | 124 | US20030138772 SEQ ID NO: 100, U.S. Pat. No. 7,198,951 SEQ ID NO: 2 |
| AAV9 | 125 | U.S. Pat. No. 7,198,951 SEQ ID NO: 3 |
| AAV9 (AAVhu.14) | 126 | US20150315612 SEQ ID NO: 3 |
| AAV9 (AAVhu.14) | 127 | US20150315612 SEQ ID NO: 123 |
| AAVA3.1 | 128 | US20030138772 SEQ ID NO: 120 |
| AAVA3.3 | 129 | US20030138772 SEQ ID NO: 57 |
| AAVA3.3 | 130 | US20030138772 SEQ ID NO: 66 |
| AAVA3.4 | 131 | US20030138772 SEQ ID NO: 54 |
| AAVA3.4 | 132 | US20030138772 SEQ ID NO: 68 |
| AAVA3.5 | 133 | US20030138772 SEQ ID NO: 55 |
| AAVA3.5 | 134 | US20030138772 SEQ ID NO: 69 |
| AAVA3.7 | 135 | US20030138772 SEQ ID NO: 56 |
| AAVA3.7 | 136 | US20030138772 SEQ ID NO: 67 |
| AAV29.3 (AAVbb.1) | 137 | US20030138772 SEQ ID NO: 11 |
| AAVC2 | 138 | US20030138772 SEQ ID NO: 61 |
| AAVCh.5 | 139 | US20150159173 SEQ ID NO: 46, US20150315612 SEQ ID NO: 234 |
| AAVcy.2 (AAV13.3) | 140 | US20030138772 SEQ ID NO: 15 |
| AAV24.1 | 141 | US20030138772 SEQ ID NO: 101 |
| AAVcy.3 (AAV24.1) | 142 | US20030138772 SEQ ID NO: 16 |
| AAV27.3 | 143 | US20030138772 SEQ ID NO: 104 |
| AAVcy.4 (AAV27.3) | 144 | US20030138772 SEQ ID NO: 17 |
| AAVcy.5 | 145 | US20150315612 SEQ ID NO: 227 |
| AAV7.2 | 146 | US20030138772 SEQ ID NO: 103 |
| AAVcy.5 (AAV7.2) | 147 | US20030138772 SEQ ID NO: 18 |
| AAV16.3 | 148 | US20030138772 SEQ ID NO: 105 |
| AAVcy.6 (AAV16.3) | 149 | US20030138772 SEQ ID NO: 10 |
| AAVcy.5 | 150 | US20150159173 SEQ ID NO: 8 |
| AAVcy.5 | 151 | US20150159173 SEQ ID NO: 24 |
| AAVCy.5R1 | 152 | US20150159173 |
| AAVCy.5R2 | 153 | US20150159173 |
| AAVCy.5R3 | 154 | US20150159173 |
| AAVCy.5R4 | 155 | US20150159173 |
| AAVDJ | 156 | US20140359799 SEQ ID NO: 3, U.S. Pat. No. 7,588,772 SEQ ID NO: 2 |
| AAVDJ | 157 | US20140359799 SEQ ID NO: 2, U.S. Pat. No. 7,588,772 SEQ ID NO: 1 |
| AAVDJ-8 | 158 | U.S. Pat. No. 7,588,772; Grimm et al 2008 |
| AAVDJ-8 | 159 | U.S. Pat. No. 7,588,772; Grimm et al 2008 |
| AAVF5 | 160 | US20030138772 SEQ ID NO: 110 |
| AAVH2 | 161 | US20030138772 SEQ ID NO: 26 |
| AAVH6 | 162 | US20030138772 SEQ ID NO: 25 |
| AAVhE1.1 | 163 | U.S. Pat. No. 9,233,131 SEQ ID NO: 44 |
| AAVhEr1.14 | 164 | U.S. Pat. No. 9,233,131 SEQ ID NO: 46 |
| AAVhEr1.16 | 165 | U.S. Pat. No. 9,233,131 SEQ ID NO: 48 |
| AAVhEr1.18 | 166 | U.S. Pat. No. 9,233,131 SEQ ID NO: 49 |
| AAVhEr1.23 | 167 | U.S. Pat. No. 9,233,131 SEQ ID NO: 53 |
| (AAVhEr2.29) | | |
| AAVhEr1.35 | 168 | U.S. Pat. No. 9,233,131 SEQ ID NO: 50 |
| AAVhEr1.36 | 169 | U.S. Pat. No. 9,233,131 SEQ ID NO: 52 |
| AAVhEr1.5 | 170 | U.S. Pat. No. 9,233,131 SEQ ID NO: 45 |
| AAVhEr1.7 | 171 | U.S. Pat. No. 9,233,131 SEQ ID NO: 51 |
| AAVhEr1.8 | 172 | U.S. Pat. No. 9,233,131 SEQ ID NO: 47 |
| AAVhEr2.16 | 173 | U.S. Pat. No. 9,233,131 SEQ ID NO: 55 |
| AAVhEr2.30 | 174 | U.S. Pat. No. 9,233,131 SEQ ID NO: 56 |
| AAVhEr2.31 | 175 | U.S. Pat. No. 9,233,131 SEQ ID NO: 58 |
| AAVhEr2.36 | 176 | U.S. Pat. No. 9,233,131 SEQ ID NO: 57 |
| AAVhEr2.4 | 177 | U.S. Pat. No. 9,233,131 SEQ ID NO: 54 |
| AAVhEr3.1 | 178 | U.S. Pat. No. 9,233,131 SEQ ID NO: 59 |
| AAVhu.1 | 179 | US20150315612 SEQ ID NO: 46 |
| AAVhu.1 | 180 | US20150315612 SEQ ID NO: 144 |
| AAVhu.10 | 181 | US20150315612 SEQ ID NO: 56 |
| (AAV16.8) | | |
| AAVhu.10 | 182 | US20150315612 SEQ ID NO: 156 |
| (AAV16.8) | | |
| AAVhu.11 | 183 | US20150315612 SEQ ID NO: 57 |
| (AAV16.12) | | |
| AAVhu.11 | 184 | US20150315612 SEQ ID NO: 153 |
| (AAV16.12) | | |
| AAVhu.12 | 185 | US20150315612 SEQ ID NO: 59 |
| AAVhu.12 | 186 | US20150315612 SEQ ID NO: 154 |
| AAVhu.13 | 187 | US20150159173 SEQ ID NO: 16, US20150315612 SEQ ID NO: 71 |
| AAVhu.13 | 188 | US20150159173 SEQ ID NO: 32, US20150315612 SEQ ID NO: 129 |
| AAVhu.136.1 | 189 | US20150315612 SEQ ID NO: 165 |
| AAVhu.140.1 | 190 | US20150315612 SEQ ID NO: 166 |
| AAVhu.140.2 | 191 | US20150315612 SEQ ID NO: 167 |
| AAVhu.145.6 | 192 | US20150315612 SEQ ID No: 178 |
| AAVhu.15 | 193 | US20150315612 SEQ ID NO: 147 |
| AAVhu.15 | 194 | US20150315612 SEQ ID NO: 50 |
| (AAV33.4) | | |
| AAVhu.156.1 | 195 | US20150315612 SEQ ID No: 179 |
| AAVhu.16 | 196 | US20150315612 SEQ ID NO: 148 |
| AAVhu.16 | 197 | US20150315612 SEQ ID NO: 51 |
| (AAV33.8) | | |
| AAVhu.17 | 198 | US20150315612 SEQ ID NO: 83 |
| AAVhu.17 | 199 | US20150315612 SEQ ID NO: 4 |
| (AAV33.12) | | |
| AAVhu.172.1 | 200 | US20150315612 SEQ ID NO: 171 |
| AAVhu.172.2 | 201 | US20150315612 SEQ ID NO: 172 |
| AAVhu.173.4 | 202 | US20150315612 SEQ ID NO: 173 |
| AAVhu.173.8 | 203 | US20150315612 SEQ ID NO: 175 |
| AAVhu.18 | 204 | US20150315612 SEQ ID NO: 52 |
| AAVhu.18 | 205 | US20150315612 SEQ ID NO: 149 |
| AAVhu.19 | 206 | US20150315612 SEQ ID NO: 62 |
| AAVhu.19 | 207 | US20150315612 SEQ ID NO: 133 |
| AAVhu.2 | 208 | US20150315612 SEQ ID NO: 48 |
| AAVhu.2 | 209 | US20150315612 SEQ ID NO: 143 |
| AAVhu.20 | 210 | US20150315612 SEQ ID NO: 63 |
| AAVhu.20 | 211 | US20150315612 SEQ ID NO: 134 |
| AAVhu.21 | 212 | US20150315612 SEQ ID NO: 65 |
| AAVhu.21 | 213 | US20150315612 SEQ ID NO: 135 |
| AAVhu.22 | 214 | US20150315612 SEQ ID NO: 67 |
| AAVhu.22 | 215 | US20150315612 SEQ ID NO: 138 |
| AAVhu.23 | 216 | US20150315612 SEQ ID NO: 60 |
| AAVhu.23.2 | 217 | US20150315612 SEQ ID NO: 137 |
| AAVhu.24 | 218 | US20150315612 SEQ ID NO: 66 |
| AAVhu.24 | 219 | US20150315612 SEQ ID NO: 136 |
| AAVhu.25 | 220 | US20150315612 SEQ ID NO: 49 |
| AAVhu.25 | 221 | US20150315612 SEQ ID NO: 146 |
| AAVhu.26 | 222 | US20150159173 SEQ ID NO: 17, US20150315612 SEQ ID NO: 61 |
| AAVhu.26 | 223 | US20150159173 SEQ ID NO: 33, US20150315612 SEQ ID NO: 139 |
| AAVhu.27 | 224 | US20150315612 SEQ ID NO: 64 |
| AAVhu.27 | 225 | US20150315612 SEQ ID NO: 140 |
| AAVhu.28 | 226 | US20150315612 SEQ ID NO: 68 |
| AAVhu.28 | 227 | US20150315612 SEQ ID NO: 130 |
| AAVhu.29 | 228 | US20150315612 SEQ ID NO: 69 |
| AAVhu.29 | 229 | US20150159173 SEQ ID NO: 42, US20150315612 SEQ ID NO: 132 |
| AAVhu.29 | 230 | US20150315612 SEQ ID NO: 225 |
| AAVhu.29R | 231 | US20150159173 |
| AAVhu.3 | 232 | US20150315612 SEQ ID NO: 44 |
| AAVhu.3 | 233 | US20150315612 SEQ ID NO: 145 |
| AAVhu.30 | 234 | US20150315612 SEQ ID NO: 70 |
| AAVhu.30 | 235 | US20150315612 SEQ ID NO: 131 |
| AAVhu.31 | 236 | US20150315612 SEQ ID NO: 1 |
| AAVhu.31 | 237 | US20150315612 SEQ ID NO: 121 |
| AAVhu.32 | 238 | US20150315612 SEQ ID NO: 2 |
| AAVhu.32 | 239 | US20150315612 SEQ ID NO: 122 |
| AAVhu.33 | 240 | US20150315612 SEQ ID NO: 75 |
| AAVhu.33 | 241 | US20150315612 SEQ ID NO: 124 |
| AAVhu.34 | 242 | US20150315612 SEQ ID NO: 72 |
| AAVhu.34 | 243 | US20150315612 SEQ ID NO: 125 |
| AAVhu.35 | 244 | US20150315612 SEQ ID NO: 73 |
| AAVhu.35 | 245 | US20150315612 SEQ ID NO: 164 |
| AAVhu.36 | 246 | US20150315612 SEQ ID NO: 74 |
| AAVhu.36 | 247 | US20150315612 SEQ ID NO: 126 |
| AAVhu.37 | 248 | US20150159173 SEQ ID NO: 34, US20150315612 SEQ ID NO: 88 |
| AAVhu.37 | 249 | US20150315612 SEQ ID NO: 10, US20150159173 SEQ ID NO: 18 |
| (AAV106.1) | | |
| AAVhu.3 8 | 250 | US20150315612 SEQ ID NO: 161 |
| AAVhu.3 9 | 251 | US20150315612 SEQ ID NO: 102 |
| AAVhu.3 9 | 252 | US20150315612 SEQ ID NO: 24 |
| (AAVLG-9) | | |
| AAVhu.4 | 253 | US20150315612 SEQ ID NO: 47 |
| AAVhu.4 | 254 | US20150315612 SEQ ID NO: 141 |
| AAVhu.40 | 255 | US20150315612 SEQ ID NO: 87 |
| AAVhu.40 | 256 | US20150315612 SEQ ID No: 11 |
| (AAV114.3) | | |
| AAVhu.41 | 257 | US20150315612 SEQ ID NO: 91 |
| AAVhu.41 | 258 | US20150315612 SEQ ID NO: 6 |
| (AAV127.2) | | |
| AAVhu.42 | 259 | US20150315612 SEQ ID NO: 85 |
| AAVhu.42 | 260 | US20150315612 SEQ ID NO: 8 |
| (AAV127.5) | | |
| AAVhu.43 | 261 | US20150315612 SEQ ID NO: 160 |
| AAVhu.43 | 262 | US20150315612 SEQ ID NO: 236 |
| AAVhu.43 | 263 | US20150315612 SEQ ID NO: 80 |
| (AAV128.1) | | |
| AAVhu.44 | 264 | US20150159173 SEQ ID NO: 45, US20150315612 SEQ ID NO: 158 |
| AAVhu.44 | 265 | US20150315612 SEQ ID NO: 81 |
| (AAV128.3) | | |
| AAVhu.44R1 | 266 | US20150159173 |
| AAVhu.44R2 | 267 | US20150159173 |
| AAVhu.44R3 | 268 | US20150159173 |
| AAVhu.45 | 269 | US20150315612 SEQ ID NO: 76 |
| AAVhu.45 | 270 | US20150315612 SEQ ID NO: 127 |
| AAVhu.46 | 271 | US20150315612 SEQ ID NO: 82 |
| AAVhu.46 | 272 | US20150315612 SEQ ID NO: 159 |
| AAVhu.46 | 273 | US20150315612 SEQ ID NO: 224 |
| AAVhu.47 | 274 | US20150315612 SEQ ID NO: 77 |
| AAVhu.47 | 275 | US20150315612 SEQ ID NO: 128 |
| AAVhu.48 | 276 | US20150159173 SEQ ID NO: 38 |
| AAVhu.48 | 277 | US20150315612 SEQ ID NO: 157 |
| AAVhu.48 | 278 | US20150315612 SEQ ID NO: 78 |
| (AAV130.4) | | |
| AAVhu.48R1 | 279 | US20150159173 |
| AAVhu.48R2 | 280 | US20150159173 |
| AAVhu.48R3 | 281 | US20150159173 |
| AAVhu.49 | 282 | US20150315612 SEQ ID NO: 209 |
| AAVhu.49 | 283 | US20150315612 SEQ ID NO: 189 |
| AAVhu.5 | 284 | US20150315612 SEQ ID NO: 45 |
| AAVhu.5 | 285 | US20150315612 SEQ ID NO: 142 |
| AAVhu.51 | 286 | US20150315612 SEQ ID NO: 208 |
| AAVhu.51 | 287 | US20150315612 SEQ ID NO: 190 |
| AAVhu.52 | 288 | US20150315612 SEQ ID NO: 210 |
| AAVhu.52 | 289 | US20150315612 SEQ ID NO: 191 |
| AAVhu.53 | 290 | US20150159173 SEQ ID NO: 19 |
| AAVhu.53 | 291 | US20150159173 SEQ ID NO: 35 |
| AAVhu.53 | 292 | US20150315612 SEQ ID NO: 176 |
| (AAV145.1) | | |
| AAVhu.54 | 293 | US20150315612 SEQ ID NO: 188 |
| AAVhu.54 | 294 | US20150315612 SEQ ID No: 177 |
| (AAV145.5) | | |
| AAVhu.55 | 295 | US20150315612 SEQ ID NO: 187 |
| AAVhu.56 | 296 | US20150315612 SEQ ID NO: 205 |
| AAVhu.56 | 297 | US20150315612 SEQ ID NO: 168 |
| (AAV145.6) | | |
| AAVhu.56 | 298 | US20150315612 SEQ ID NO: 192 |
| (AAV145.6) | | |
| AAVhu.57 | 299 | US20150315612 SEQ ID NO: 206 |
| AAVhu.57 | 300 | US20150315612 SEQ ID NO: 169 |
| AAVhu.57 | 301 | US20150315612 SEQ ID NO: 193 |
| AAVhu.58 | 302 | US20150315612 SEQ ID NO: 207 |
| AAVhu.58 | 303 | US20150315612 SEQ ID NO: 194 |
| AAVhu.6 (AAV3.1) | 304 | US20150315612 SEQ ID NO: 5 |
| AAVhu.6 (AAV3.1) | 305 | US20150315612 SEQ ID NO: 84 |
| AAVhu.60 | 306 | US20150315612 SEQ ID NO: 184 |
| AAVhu.60 | 307 | US20150315612 SEQ ID NO: 170 |
| (AAV161.10) | | |
| AAVhu.61 | 308 | US20150315612 SEQ ID NO: 185 |
| AAVhu.61 | 309 | US20150315612 SEQ ID NO: 174 |
| (AAV161.6) | | |
| AAVhu.63 | 310 | US20150315612 SEQ ID NO: 204 |
| AAVhu.63 | 311 | US20150315612 SEQ ID NO: 195 |
| AAVhu.64 | 312 | US20150315612 SEQ ID NO: 212 |
| AAVhu.64 | 313 | US20150315612 SEQ ID NO: 196 |
| AAVhu.66 | 314 | US20150315612 SEQ ID NO: 197 |
| AAVhu.67 | 315 | US20150315612 SEQ ID NO: 215 |
| AAVhu.67 | 316 | US20150315612 SEQ ID NO: 198 |
| AAVhu.7 | 317 | US20150315612 SEQ ID NO: 226 |
| AAVhu.7 | 318 | US20150315612 SEQ ID NO: 150 |
| AAVhu.7 (AAV7.3) | 319 | US20150315612 SEQ ID NO: 55 |
| AAVhu.71 | 320 | US20150315612 SEQ ID NO: 79 |
| AAVhu.8 | 321 | US20150315612 SEQ ID NO: 53 |
| AAVhu.8 | 322 | US20150315612 SEQ ID NO: 12 |
| AAVhu.8 | 323 | US20150315612 SEQ ID NO: 151 |
| AAVhu.9 (AAV3.1) | 324 | US20150315612 SEQ ID NO: 58 |
| AAVhu.9 (AAV3.1) | 325 | US20150315612 SEQ ID NO: 155 |
| AAV-LK01 | 326 | US20150376607 SEQ ID NO: 2 |
| AAV-LK01 | 327 | US20150376607 SEQ ID NO: 29 |
| AAV-LK02 | 328 | US20150376607 SEQ ID NO: 3 |
| AAV-LK02 | 329 | US20150376607 SEQ ID NO: 30 |
| AAV-LK03 | 330 | US20150376607 SEQ ID NO: 4 |
| AAV-LK03 | 331 | WO2015121501 SEQ ID NO: 12, US20150376607 SEQ ID NO: 31 |
| AAV-LK04 | 332 | US20150376607 SEQ ID NO: 5 |
| AAV-LK04 | 333 | US20150376607 SEQ ID NO: 32 |
| AAV-LK05 | 334 | US20150376607 SEQ ID NO: 6 |
| AAV-LK05 | 335 | US20150376607 SEQ ID NO: 33 |
| AAV-LK06 | 336 | US20150376607 SEQ ID NO: 7 |
| AAV-LK06 | 337 | US20150376607 SEQ ID NO: 34 |
| AAV-LK07 | 338 | US20150376607 SEQ ID NO: 8 |
| AAV-LK07 | 339 | US20150376607 SEQ ID NO: 35 |
| AAV-LK08 | 340 | US20150376607 SEQ ID NO: 9 |
| AAV-LK08 | 341 | US20150376607 SEQ ID NO: 36 |
| AAV-LK09 | 342 | US20150376607 SEQ ID NO: 10 |
| AAV-LK09 | 343 | US20150376607 SEQ ID NO: 37 |
| AAV-LK10 | 344 | US20150376607 SEQ ID NO: 11 |
| AAV-LK10 | 345 | US20150376607 SEQ ID NO: 38 |
| AAV-LK11 | 346 | US20150376607 SEQ ID NO: 12 |
| AAV-LK11 | 347 | US20150376607 SEQ ID NO: 39 |
| AAV-LK12 | 348 | US20150376607 SEQ ID NO: 13 |
| AAV-LK12 | 349 | US20150376607 SEQ ID NO: 40 |
| AAV-LK13 | 350 | US20150376607 SEQ ID NO: 14 |
| AAV-LK13 | 351 | US20150376607 SEQ ID NO: 41 |
| AAV-LK14 | 352 | US20150376607 SEQ ID NO: 15 |
| AAV-LK14 | 353 | US20150376607 SEQ ID NO: 42 |
| AAV-LK15 | 354 | US20150376607 SEQ ID NO: 16 |
| AAV-LK15 | 355 | US20150376607 SEQ ID NO: 43 |
| AAV-LK16 | 356 | US20150376607 SEQ ID NO: 17 |
| AAV-LK16 | 357 | US20150376607 SEQ ID NO: 44 |
| AAV-LK17 | 358 | US20150376607 SEQ ID NO: 18 |
| AAV-LK17 | 359 | US20150376607 SEQ ID NO: 45 |
| AAV-LK18 | 360 | US20150376607 SEQ ID NO: 19 |
| AAV-LK18 | 361 | US20150376607 SEQ ID NO: 46 |
| AAV-LK19 | 362 | US20150376607 SEQ ID NO: 20 |
| AAV-LK19 | 363 | US20150376607 SEQ ID NO: 47 |
| AAV-PAEC | 364 | US20150376607 SEQ ID NO: 1 |
| AAV-PAEC | 365 | US20150376607 SEQ ID NO: 48 |
| AAV-PAEC11 | 366 | US20150376607 SEQ ID NO: 26 |
| AAV-PAEC11 | 367 | US20150376607 SEQ ID NO: 54 |
| AAV-PAEC12 | 368 | US20150376607 SEQ ID NO: 27 |
| AAV-PAEC12 | 369 | US20150376607 SEQ ID NO: 51 |
| AAV-PAEC13 | 370 | US20150376607 SEQ ID NO: 28 |
| AAV-PAEC13 | 371 | US20150376607 SEQ ID NO: 49 |
| AAV-PAEC2 | 372 | US20150376607 SEQ ID NO: 21 |
| AAV-PAEC2 | 373 | US20150376607 SEQ ID NO: 56 |
| AAV-PAEC4 | 374 | US20150376607 SEQ ID NO: 22 |
| AAV-PAEC4 | 375 | US20150376607 SEQ ID NO: 55 |
| AAV-PAEC6 | 376 | US20150376607 SEQ ID NO: 23 |
| AAV-PAEC6 | 377 | US20150376607 SEQ ID NO: 52 |
| AAV-PAEC7 | 378 | US20150376607 SEQ ID NO: 24 |
| AAV-PAEC7 | 379 | US20150376607 SEQ ID NO: 53 |
| AAV-PAEC8 | 380 | US20150376607 SEQ ID NO: 25 |
| AAV-PAEC8 | 381 | US20150376607 SEQ ID NO: 50 |
| AAVpi.1 | 382 | US20150315612 SEQ ID NO: 28 |
| AAVpi.1 | 383 | US20150315612 SEQ ID NO: 93 |
| AAVpi.2 | 384 | US20150315612 SEQ ID NO: 30 |
| AAVpi.2 | 385 | US20150315612 SEQ ID NO: 95 |
| AAVpi.3 | 386 | US20150315612 SEQ ID NO: 29 |
| AAVpi.3 | 387 | US20150315612 SEQ ID NO: 94 |
| AAVrh.10 | 388 | US20150159173 SEQ ID NO: 9 |
| AAVrh.10 | 389 | US20150159173 SEQ ID NO: 25 |
| AAV44.2 | 390 | US20030138772 SEQ ID NO: 59 |
| AAVrh.10 | 391 | US20030138772 SEQ ID NO: 81 |
| (AAV44.2) | | |
| AAV42.1B | 392 | US20030138772 SEQ ID NO: 90 |
| AAVrh.12 | 393 | US20030138772 SEQ ID NO: 30 |
| (AAV42.1b) | | |
| AAVrh.13 | 394 | US20150159173 SEQ ID NO: 10 |
| AAVrh.13 | 395 | US20150159173 SEQ ID NO: 26 |
| AAVrh.13 | 396 | US20150315612 SEQ ID NO: 228 |
| AAVrh.13R | 397 | US20150159173 |
| AAV42.3A | 398 | US20030138772 SEQ ID NO: 87 |
| AAVrh.14 | 399 | US20030138772 SEQ ID NO: 32 |
| (AAV42.3a) | | |
| AAV42.5A | 400 | US20030138772 SEQ ID NO: 89 |
| AAVrh.17 | 401 | US20030138772 SEQ ID NO: 34 |
| (AAV42.5a) | | |
| AAV42.5B | 402 | US20030138772 SEQ ID NO: 91 |
| AAVrh.18 | 403 | US20030138772 SEQ ID NO: 29 |
| (AAV42.5b) | | |
| AAV42.6B | 404 | US20030138772 SEQ ID NO: 112 |
| AAVrh.19 | 405 | US20030138772 SEQ ID NO: 38 |
| (AAV42.6b) | | |
| AAVrh.2 | 406 | US20150159173 SEQ ID NO: 39 |
| AAVrh.2 | 407 | US20150315612 SEQ ID NO: 231 |
| AAVrh.20 | 408 | US20150159173 SEQ ID NO: 1 |
| AAV42.10 | 409 | US20030138772 SEQ ID NO: 106 |
| AAVrh.21 | 410 | US20030138772 SEQ ID NO: 35 |
| (AAV42.10) | | |
| AAV42.11 | 411 | US20030138772 SEQ ID NO: 108 |
| AAVrh.22 | 412 | US20030138772 SEQ ID NO: 37 |
| (AAV42.11) | | |
| AAV42.12 | 413 | US20030138772 SEQ ID NO: 113 |
| AAVrh.23 | 414 | US20030138772 SEQ ID NO: 58 |
| (AAV42.12) | | |
| AAV42.13 | 415 | US20030138772 SEQ ID NO: 86 |
| AAVrh.24 | 416 | US20030138772 SEQ ID NO: 31 |
| (AAV42.13) | | |
| AAV42.15 | 417 | US20030138772 SEQ ID NO: 84 |
| AAVrh.25 | 418 | US20030138772 SEQ ID NO: 28 |
| (AAV42.15) | | |
| AAVrh.2R | 419 | US20150159173 |
| AAVrh.31 | 420 | US20030138772 SEQ ID NO: 48 |
| (AAV223.1) | | |
| AAVC1 | 421 | US20030138772 SEQ ID NO: 60 |
| AAVrh.32 (AAVC1) | 422 | US20030138772 SEQ ID NO: 19 |
| AAVrh.32/33 | 423 | US20150159173 SEQ ID NO: 2 |
| AAVrh.33 (AAVC3) | 424 | US20030138772 SEQ ID NO: 20 |
| AAVC5 | 425 | US20030138772 SEQ ID NO: 62 |
| AAVrh.34 (AAVC5) | 426 | US20030138772 SEQ ID NO: 21 |
| AAVF1 | 427 | US20030138772 SEQ ID NO: 109 |
| AAVrh.35 (AAVF1) | 428 | US20030138772 SEQ ID NO: 22 |
| AAVF3 | 429 | US20030138772 SEQ ID NO: 111 |
| AAVrh.36 (AAVF3) | 430 | US20030138772 SEQ ID NO: 23 |
| AAVrh.37 | 431 | US20030138772 SEQ ID NO: 24 |
| AAVrh.37 | 432 | US20150159173 SEQ ID NO: 40 |
| AAVrh.37 | 433 | US20150315612 SEQ ID NO: 229 |
| AAVrh.37R2 | 434 | US20150159173 |
| AAVrh.38 (AAVLG- | 435 | US20150315612 SEQ ID NO: 7 |
| 4) | | |
| AAVrh.38 (AAVLG- | 436 | US20150315612 SEQ ID NO: 86 |
| 4) | | |
| AAVrh.39 | 437 | US20150159173 SEQ ID NO: 20, US20150315612 SEQ ID NO: 13 |
| AAVrh.39 | 438 | US20150159173 SEQ ID NO: 3, US20150159173 SEQ ID NO: 36, |
| | | US20150315612 SEQ ID NO: 89 |
| AAVrh.40 | 439 | US20150315612 SEQ ID NO: 92 |
| AAVrh.40 (AAVLG- | 440 | US20150315612 SEQ ID No: 14 |
| 10) | | |
| AAVrh.43 | 441 | US20150315612 SEQ ID NO: 43, US20150159173 SEQ ID NO: 21 |
| (AAVN721-8) | | |
| AAVrh.43 | 442 | US20150315612 SEQ ID NO: 163, US20150159173 SEQ ID NO: 37 |
| (AAVN721-8) | | |
| AAVrh.44 | 443 | US20150315612 SEQ ID NO: 34 |
| AAVrh.44 | 444 | US20150315612 SEQ ID NO: 111 |
| AAVrh.45 | 445 | US20150315612 SEQ ID NO: 41 |
| AAVrh.45 | 446 | US20150315612 SEQ ID NO: 109 |
| AAVrh.46 | 447 | US20150159173 SEQ ID NO: 22, US20150315612 SEQ ID NO: 19 |
| AAVrh.46 | 448 | US20150159173 SEQ ID NO: 4, US20150315612 SEQ ID NO: 101 |
| AAVrh.47 | 449 | US20150315612 SEQ ID NO: 38 |
| AAVrh.47 | 450 | US20150315612 SEQ ID NO: 118 |
| AAVrh.48 | 451 | US20150159173 SEQ ID NO: 44, US20150315612 SEQ ID NO: 115 |
| AAVrh.48.1 | 452 | US20150159173 |
| AAVrh.48.1.2 | 453 | US20150159173 |
| AAVrh.48.2 | 454 | US20150159173 |
| AAVrh.48 (AAV1-7) | 455 | US20150315612 SEQ ID NO: 32 |
| AAVrh.49 (AAV1-8) | 456 | US20150315612 SEQ ID NO: 25 |
| AAVrh.49 (AAV1-8) | 457 | US20150315612 SEQ ID NO: 103 |
| AAVrh.50 (AAV2-4) | 458 | US20150315612 SEQ ID NO: 23 |
| AAVrh.50 (AAV2-4) | 459 | US20150315612 SEQ ID NO: 108 |
| AAVrh.51 (AAV2-5) | 460 | US20150315612 SEQ ID No: 22 |
| AAVrh.51 (AAV2-5) | 461 | US20150315612 SEQ ID NO: 104 |
| AAVrh.52 (AAV3-9) | 462 | US20150315612 SEQ ID NO: 18 |
| AAVrh.52 (AAV3-9) | 463 | US20150315612 SEQ ID NO: 96 |
| AAVrh.53 | 464 | US20150315612 SEQ ID NO: 97 |
| AAVrh.53 (AAV3- | 465 | US20150315612 SEQ ID NO: 17 |
| 11) | | |
| AAVrh.53 (AAV3- | 466 | US20150315612 SEQ ID NO: 186 |
| 11) | | |
| AAVrh.54 | 467 | US20150315612 SEQ ID NO: 40 |
| AAVrh.54 | 468 | US20150159173 SEQ ID NO: 49, US20150315612 SEQ ID NO: 116 |
| AAVrh.55 | 469 | US20150315612 SEQ ID NO: 37 |
| AAVrh.55 (AAV4- | 470 | US20150315612 SEQ ID NO: 117 |
| 19) | | |
| AAVrh.56 | 471 | US20150315612 SEQ ID NO: 54 |
| AAVrh.56 | 472 | US20150315612 SEQ ID NO: 152 |
| AAVrh.57 | 473 | US20150315612 SEQ ID NO: 26 |
| AAVrh.57 | 474 | US20150315612 SEQ ID NO: 105 |
| AAVrh.58 | 475 | US20150315612 SEQ ID NO: 27 |
| AAVrh.58 | 476 | US20150159173 SEQ ID NO: 48, US20150315612 SEQ ID NO: 106 |
| AAVrh.58 | 477 | US20150315612 SEQ ID NO: 232 |
| AAVrh.59 | 478 | US20150315612 SEQ ID NO: 42 |
| AAVrh.59 | 479 | US20150315612 SEQ ID NO: 110 |
| AAVrh.60 | 480 | US20150315612 SEQ ID NO: 31 |
| AAVrh.60 | 481 | US20150315612 SEQ ID NO: 120 |
| AAVrh.61 | 482 | US20150315612 SEQ ID NO: 107 |
| AAVrh.61 (AAV2-3) | 483 | US20150315612 SEQ ID NO: 21 |
| AAVrh.62 (AAV2- | 484 | US20150315612 SEQ ID No: 33 |
| 15) | | |
| AAVrh.62 (AAV2- | 485 | US20150315612 SEQ ID NO: 114 |
| 15) | | |
| AAVrh.64 | 486 | US20150315612 SEQ ID No: 15 |
| AAVrh.64 | 487 | US20150159173 SEQ ID NO: 43, US20150315612 SEQ ID NO: 99 |
| AAVrh.64 | 488 | US20150315612 SEQ ID NO: 233 |
| AAVR11.64R1 | 489 | US20150159173 |
| AAVR11.64R2 | 490 | US20150159173 |
| AAVrh.65 | 491 | US20150315612 SEQ ID NO: 35 |
| AAVrh.65 | 492 | US20150315612 SEQ ID NO: 112 |
| AAVrh.67 | 493 | US20150315612 SEQ ID NO: 36 |
| AAVrh.67 | 494 | US20150315612 SEQ ID NO: 230 |
| AAVrh.67 | 495 | US20150159173 SEQ ID NO: 47, US20150315612 SEQ ID NO: 113 |
| AAVrh.68 | 496 | US20150315612 SEQ ID NO: 16 |
| AAVrh.68 | 497 | US20150315612 SEQ ID NO: 100 |
| AAVrh.69 | 498 | US20150315612 SEQ ID NO: 39 |
| AAVrh.69 | 499 | US20150315612 SEQ ID NO: 119 |
| AAVrh.70 | 500 | US20150315612 SEQ ID NO: 20 |
| AAVrh.70 | 501 | US20150315612 SEQ ID NO: 98 |
| AAVrh.71 | 502 | US20150315612 SEQ ID NO: 162 |
| AAVrh.72 | 503 | US20150315612 SEQ ID NO: 9 |
| AAVrh.73 | 504 | US20150159173 SEQ ID NO: 5 |
| AAVrh.74 | 505 | US20150159173 SEQ ID NO: 6 |
| AAVrh.8 | 506 | US20150159173 SEQ ID NO: 41 |
| AAVrh.8 | 507 | US20150315612 SEQ ID NO: 235 |
| AAVrh.8R | 508 | US20150159173, WO2015168666 SEQ ID NO: 9 |
| AAVrh.8R A586R | 509 | WO2015168666 SEQ ID NO: 10 |
| mutant | | |
| AAVrh.8R R533A | 510 | WO2015168666 SEQ ID NO: 11 |
| mutant | | |
| BAAV (bovine | 511 | U.S. Pat. No. 9,193,769 SEQ ID NO: 8 |
| AAV) | | |
| BAAV (bovine | 512 | U.S. Pat. No. 9,193,769 SEQ ID NO: 10 |
| AAV) | | |
| BAAV (bovine | 513 | U.S. Pat. No. 9,193,769 SEQ ID NO: 4 |
| AAV) | | |
| BAAV (bovine | 514 | U.S. Pat. No. 9,193,769 SEQ ID NO: 2 |
| AAV) | | |
| BAAV (bovine | 515 | U.S. Pat. No. 9,193,769 SEQ ID NO: 6 |
| AAV) | | |
| BAAV (bovine | 516 | U.S. Pat. No. 9,193,769 SEQ ID NO: 1 |
| AAV) | | |
| BAAV (bovine | 517 | U.S. Pat. No. 9,193,769 SEQ ID NO: 5 |
| AAV) | | |
| BAAV (bovine | 518 | U.S. Pat. No. 9,193,769 SEQ ID NO: 3 |
| AAV) | | |
| BAAV (bovine | 519 | U.S. Pat. No. 9,193,769 SEQ ID NO: 11 |
| AAV) | | |
| BAAV (bovine | 520 | U.S. Pat. No. 7,427,396 SEQ ID NO: 5 |
| AAV) | | |
| BAAV (bovine | 521 | U.S. Pat. No. 7,427,396 SEQ ID NO: 6 |
| AAV) | | |
| BAAV (bovine | 522 | U.S. Pat. No. 9,193,769 SEQ ID NO: 7 |
| AAV) | | |
| BAAV (bovine | 523 | U.S. Pat. No. 9,193,769 SEQ ID NO: 9 |
| AAV) | | |
| BNP61 AAV | 524 | US20150238550 SEQ ID NO: 1 |
| BNP61 AAV | 525 | US20150238550 SEQ ID NO: 2 |
| BNP62 AAV | 526 | US20150238550 SEQ ID NO: 3 |
| BNP63 AAV | 527 | US20150238550 SEQ ID NO: 4 |
| caprine AAV | 528 | U.S. Pat. No. 7,427,396 SEQ ID NO: 3 |
| caprine AAV | 529 | U.S. Pat. No. 7,427,396 SEQ ID NO: 4 |
| true type AAV | 530 | WO2015121501 SEQ ID NO: 2 |
| (ttAAV) | | |
| AAAV (Avian AAV) | 531 | U.S. Pat. No. 9,238,800 SEQ ID NO: 12 |
| AAAV (Avian AAV) | 532 | U.S. Pat. No. 9,238,800 SEQ ID NO: 2 |
| AAAV (Avian AAV) | 533 | U.S. Pat. No. 9,238,800 SEQ ID NO: 6 |
| AAAV (Avian AAV) | 534 | U.S. Pat. No. 9,238,800 SEQ ID NO: 4 |
| AAAV (Avian AAV) | 535 | U.S. Pat. No. 9,238,800 SEQ ID NO: 8 |
| AAAV (Avian AAV) | 536 | U.S. Pat. No. 9,238,800 SEQ ID NO: 14 |
| AAAV (Avian AAV) | 537 | U.S. Pat. No. 9,238,800 SEQ ID NO: 10 |
| AAAV (Avian AAV) | 538 | U.S. Pat. No. 9,238,800 SEQ ID NO: 15 |
| AAAV (Avian AAV) | 539 | U.S. Pat. No. 9,238,800 SEQ ID NO: 5 |
| AAAV (Avian AAV) | 540 | U.S. Pat. No. 9,238,800 SEQ ID NO: 9 |
| AAAV (Avian AAV) | 541 | U.S. Pat. No. 9,238,800 SEQ ID NO: 3 |
| AAAV (Avian AAV) | 542 | U.S. Pat. No. 9,238,800 SEQ ID NO: 7 |
| AAAV (Avian AAV) | 543 | U.S. Pat. No. 9,238,800 SEQ ID NO: 11 |
| AAAV (Avian AAV) | 544 | U.S. Pat. No. 9,238,800 SEQ ID NO: 13 |
| AAAV (Avian AAV) | 545 | U.S. Pat. No. 9,238,800 SEQ ID NO: 1 |
| AAV Shuffle 100-1 | 546 | US20160017295 SEQ ID NO: 23 |
| AAV Shuffle 100-1 | 547 | US20160017295 SEQ ID NO: 11 |
| AAV Shuffle 100-2 | 548 | US20160017295 SEQ ID NO: 37 |
| AAV Shuffle 100-2 | 549 | US20160017295 SEQ ID NO: 29 |
| AAV Shuffle 100-3 | 550 | US20160017295 SEQ ID NO: 24 |
| AAV Shuffle 100-3 | 551 | US20160017295 SEQ ID NO: 12 |
| AAV Shuffle 100-7 | 552 | US20160017295 SEQ ID NO: 25 |
| AAV Shuffle 100-7 | 553 | US20160017295 SEQ ID NO: 13 |
| AAV Shuffle 10-2 | 554 | US20160017295 SEQ ID NO: 34 |
| AAV Shuffle 10-2 | 555 | US20160017295 SEQ ID NO: 26 |
| AAV Shuffle 10-6 | 556 | US20160017295 SEQ ID NO: 35 |
| AAV Shuffle 10-6 | 557 | US20160017295 SEQ ID NO: 27 |
| AAV Shuffle 10-8 | 558 | US20160017295 SEQ ID NO: 36 |
| AAV Shuffle 10-8 | 559 | US20160017295 SEQ ID NO: 28 |
| AAV SM 100-10 | 560 | US20160017295 SEQ ID NO: 41 |
| AAV SM 100-10 | 561 | US20160017295 SEQ ID NO: 33 |
| AAV SM 100-3 | 562 | US20160017295 SEQ ID NO: 40 |
| AAV SM 100-3 | 563 | US20160017295 SEQ ID NO: 32 |
| AAV SM 10-1 | 564 | US20160017295 SEQ ID NO: 38 |
| AAV SM 10-1 | 565 | US20160017295 SEQ ID NO: 30 |
| AAV SM 10-2 | 566 | US20160017295 SEQ ID NO: 10 |
| AAV SM 10-2 | 567 | US20160017295 SEQ ID NO: 22 |
| AAV SM 10-8 | 568 | US20160017295 SEQ ID NO: 39 |
| AAV SM 10-8 | 569 | US20160017295 SEQ ID NO: 31 |

[0146] Each of the patents, applications and/or publications listed in Table 3 are hereby incorporated by reference in their entirety.

[0147] In one embodiment, the AAV serotype may be engineered to comprise at least one AAV capsid CD8+ T-cell epitope. Hui et al. (Molecular Therapy—Methods & Clinical Development (2015) 2, 15029 doi:10.1038/mtm.2015.29; the contents of which are herein incorporated by reference in its entirety) identified AAV capsid-specific CD8+ T-cell epitopes for AAV1 and AAV2 (see e.g., Table 2 in the publication). As a non-limiting example, the capsid-specific CD8+ T-cell epitope may be for an AAV2 serotype. As a non-limiting example, the capsid-specific CD8+ T-cell epitope may be for an AAV1 serotype.

[0148] In one embodiment, peptides for inclusion in an AAV serotype may be identified using the methods described by Hui et al. (Molecular Therapy—Methods & Clinical Development (2015) 2, 15029 doi:10.1038/mtm.2015.29; the contents of which are herein incorporated by reference in its entirety). As a non-limiting example, the procedure includes isolating human splenocytes, restimulating the splenocytes in vitro using individual peptides spanning the amino acid sequence of the AAV capsid protein, IFN-gamma ELISpot with the individual peptides used for the in vitro restimulation, bioinformatics analysis to determine the HLA restriction of 15-mers identified by IFN-gamma ELISpot, identification of candidate reactive 9-mer epitopes for a given HLA allele, synthesis candidate 9-mers, second IFN-gamma ELISpot screening of splenocytes from subjects carrying the HLA alleles to which identified AAV epitopes are predicted to bind, determine the AAV capsid-reactive CD8+ T cell epitopes and determine the frequency of subjects reacting to a given AAV epitope.

[0149] In one embodiment, peptides for inclusion in an AAV serotype may be identified by isolating human splenocytes, restimulating the splenocytes in vitro using individual peptides spanning the amino acid sequence of the AAV capsid protein, IFN-gamma ELISpot with the individual peptides used for the in vitro restimulation, bioinformatics analysis to determine the given allele restriction of 15-mers identified by IFN-gamma ELISpot, identification of candidate reactive 9-mer epitopes for a given allele, synthesis candidate 9-mers, second IFN-gamma ELISpot screening of splenocytes from subjects carrying the specific alleles to which identified AAV epitopes are predicted to bind, determine the AAV capsid-reactive CD8+ T cell epitopes and determine the frequency of subjects reacting to a given AAV epitope.

[0150] AAV vectors comprising the nucleic acid sequence for the siRNA molecules may be prepared or derived from various serotypes of AAVs, including, but not limited to, AAV1, AAV2, AAV3, AAV4, AAV5, AAV6, AAV7, AAV8, AAV9, AAV9.47, AAV9(hul4), AAV10, AAV11, AAV12, AAVrh8, AAVrh10, AAV-DJ8 and AAV-DJ. In some cases, different serotypes of AAVs may be mixed together or with other types of viruses to produce chimeric AAV vectors. As a non-limiting example, the AAV vector is derived from the AAV9 serotype.

[0151] In one embodiment, AAV particles of the present invention may comprise capsid proteins having sequences of SEQ ID NOs: 1 and 3, which have increased tropism to the brain, of International Publication No. WO2014160092, the content of which is incorporated herein by reference in its entirety.

[0152] In one embodiment, AAV particles of the present invention may comprise capsid proteins which may target to oligodendrocytes in the central nervous system. The capsid proteins may comprise AAV capsid coding sequence of SEQ ID NO: 1 or AAV capsid proteins comprising amino acid sequences of SEQ ID NOs: 2 to 4 of International Publication No. WO2014052789, the content of which is herein incorporated by reference in its entirety.

[0153] In one embodiment, AAV particles of the present invention may comprise capsid proteins having increased capacity to cross the blood-brain barrier in CNS as disclosed in U.S. Pat. No. 8,927,514, the content of which is incorporated herein by reference in its entirety. The amino acid sequences and nucleic acid sequences of such capsid proteins may include, but are not limited to, SEQ ID NOs: 2-17 and SEQ ID NOs: 25-33, respectively, of U.S. Pat. No. 8,927,514.

[0154] In some embodiments, AAV particles of the present invention may comprise AAV2 capsid proteins or variants thereof. AAV particles with AAV2 capsid proteins have been shown to deliver genes to neurons effectively in the brain, retina and spinal cord. In one embodiment, AAV2 capsid proteins may be further modified such as addition of a targeting peptide to the capsid proteins that targets an AAV particle to brain vascular endothelium as disclosed in U.S. Pat. Nos. 6,691,948 and 8, 299,215, the contents of each of which are herein incorporated by reference in their entirety. Such AAV particles may be used to deliver a functional payload of interest to treat a brain disease such as mucopolysaccharide (MPS).

[0155] In some embodiments, AAV particles of the present invention may comprise AAVS capsid proteins or variants thereof. AAV particles with AAVS capsid proteins can transduce neurons in various regions of the CNS, including the cortex, the hippocampus (HPC), cerebellum, substantia nigra (SN), striatum, globus pallidus, and spinal cord (Burger C et al., Mol Ther., 2004, 10(2): 302-317; Liu Get al., Mol Ther. 2007, 15(2): 242-247; and Colle M et al., Hum, Mol. Genet. 2010, 19(1): 147-158). In one embodiment, AAV particles having AAVS capsid proteins with increased transduction to cells in CNS may be those particles from U.S. Pat. No. 7,056,502, the content of which is incorporated herein by reference in its entirety.

[0156] In some embodiments, AAV particles of the present invention may comprise AAV6 capsid proteins or variants thereof. Recombinant AAV6 serotype can target motor neurons in the spinal cord by Intracerebroventricular (ICV) injection (Dirren E et al., Hum Gene Ther., 2014, 25(2): 109-120). In addition, a study from San Sebastian et al indicated that AAV6 serotype can be retrogradely transported from terminals to neuronal cell bodies in the rat brain (San Sebastian et al, Gen Ther., 2014, 20(12): 1178-1183).

[0157] In some embodiments, AAV particles of the present invention may comprise AAV8 capsid proteins or variants thereof. AAV particles with AAV8 capsid proteins can transduce neurons, for example in hippocampus (Klein RL et al., Mol Ther., 2006, 13(3): 517-527). In one embodiment, AAV8 capsid proteins may comprise the amino acid sequence of SEQ ID NO: 2 of U.S. Pat. No. 8,318,480, the content of which is herein incorporated by reference in its entirety.

[0158] In some embodiments, AAV particles of the present invention may comprise AAV9 capsid proteins or variants thereof. AAV9 capsid serotype mediated gene delivery has been observed in the brain with efficient and long-term expression of transgene after intraparenchymal injections to the CNS (Klein R L et al., Eur J Neurosci., 2008, 27: 1615-1625). AAV9 serotype can produce robust and wide-scale neuronal transduction throughout the CNS after a peripheral, systemic (e.g., intravenous) administration in neonatal subjects (Foust K D et al., Nat. Biotechnol., 2009, 27: 59-65; and Duque S et al, Mol Ther., 2009, 17: 1187-1196). Intrathecal (intra-cisterna magna routes) administration of AAV9 serotypes can also produce widespread spinal expression. In one embodiment, AAV9 serotype may comprise an AAV capsid protein having the amino acid sequence of SEQ ID NO: 2 of U.S. Pat. No. 7,198,951, the content of which is incorporated herein by reference in its entirety. In another aspect, AAV9 serotype may comprise VP1 capsid proteins of SEQ ID NOs: 2, 4 or 6 in which at least one of surface-exposed tyrosine residues in the amino acid sequence is substituted with another amino acid residue, as disclosed in US patent publication No. US20130224836, the content of which is incorporated herein by reference in its entirety.

[0159] In some embodiments, AAV particles of the present invention may comprise AAVrh10 capsid proteins or variants thereof. AAV particles comprising AAVrh10 capsid proteins can target neurons, other cells as well, in the spinal cord after intrathecal (IT) administration. In one embodiment, AAVrh10 capsid proteins may comprise the amino acid sequence of SEQ ID NO: 81 of EP patent NO: 2341068.

[0160] In some embodiments, AAV of the present invention may comprise AAVDJ capsid proteins, AAVDJ/8 capsid proteins, or variants thereof. Holehonnur et al showed that AAVDJ/8 serotype can target neurons within the Basal and Lateral Amygdala (BLA) (Holennur Ret al., BMC Neurosci, 2014, Feb. 18:15:28). In one embodiment, AAVDJ capsid proteins and/or AAVDJ/8 capsid proteins may comprise an amino acid sequence comprising a first region that is derived from a first AAV serotype (e.g., AAV2), a second region that is derived from a second AAV serotype (e.g., AAV8), and a third region that is derived from a third AAV serotype (e.g., AAV9), wherein the first, second and third region may include any amino acid sequences that are disclosed in this description.

[0161] In some embodiment, AAV particles produced according to the present invention may comprise single stranded DNA viral genomes (ssAAVs) or self-complementary AAV genomes (scAAVs). scAAV genomes contain both DNA strands which anneal together to form double stranded DNA. By skipping second strand synthesis, scAAVs allow for rapid expression in the cell.

[0162] In one embodiment, AAV particles of the present invention may comprise capsid proteins that have been shown to or are known to transduce dorsal root ganglions (DRGs).

[0163] In one embodiment, AAV particles of the present invention may comprise capsid proteins that have been shown or are known to transduce motor neurons.

[0164] In one embodiment, the AAV particles comprise a self-complementary (SC) viral genome.

[0165] In one embodiment, the AAV particles comprise a single stranded (SS) genome.

[0166] In one embodiment, an AAV particle comprising a self-complementary (sc) viral may be used to yield higher expression than an AAV particle comprising a corresponding single stranded viral genome.

[0167] In one embodiment, the serotype of the AAV particles described herein may depend on the desired distribution, transduction efficiency and cellular targeting required. As described by Sorrentino et al. (comprehensive map of CNS transduction by eight adeno-associated virus serotypes upon cerebrospinal fluid administration in pigs, Molecular Therapy accepted article preview online 7 Dec. 2015; doi:10.1038/mt.2015.212; the contents of which are herein incorporated by reference in its entirety), AAV serotypes provided different distributions, transduction efficiencies and cellular targeting. In order to provide the desired efficacy, the AAV serotype needs to be selected that best matches not only the cells to be targeted but also the desired transduction efficiency and distribution.

[0168] The invention also provides nucleic acids encoding the mutated or modified virus capsids and capsid proteins of the invention. In some embodiments the capsids are engineered according to the methods of co-owned and co-pending application PCT/US2015/034799 filed Jun. 9, 2015, the contents of which are incorporated herein by reference in their entirety and methods known in the art.

### Regulatable-AAV Particle

[0169] Described herein are regulatable-AAV particles comprising regulatable elements, which allow the payload expression to be controlled quickly and tightly in a spatial and temporal manner. This will allow the payload expression to be adjusted to the appropriate levels at the appropriate time.

[0170] In one embodiment, the present invention provides administration and/or delivery methods for regulatable-AAV particles. As used herein, the term “regulatable-AAV particle” is an AAV particle which comprises a capsid, a polynucleotide, and one or more regulatable elements and/or a payload which is regulated by one or more regulatable elements. As used herein, the term “regulatable element” (also referred to as regulatory element) refers to one or more components, factors, polynucleotide features or motifs which imparts regulatable or tunable features to regulate the expression of a payload.

[0171] In one embodiment, the payload and the regulatable element may be located on the same viral genomes. In one embodiment, the payload and the regulatable element may be located on separate viral genomes.

### Regulatable Elements

[0172] In one embodiment, in the development of regulatable-AAV particles several parameters for effective regulation are considered such as, but not limited to, the effect on the endogenous expression of the genes, restricting the expression of the transgene to the intended cell type, allow for an “OFF” state for the payload to provide little to no expression of the payload, allow for the expression of the payload to be turned on and off quickly, induce expression of the payload by stimulus or drug.

[0173] In one embodiment, the regulatable-AAV particle comprising at least one regulatable element should have no effects on the endogenous expression of genes and be non-immunogenic, so as not to interfere with the desired outcome of payload expression.

[0174] In one embodiment, the regulatable elements may be chosen in a manner that will restrict the expression of the transgene to the intended cell type specific expression.

[0175] In one embodiment, the regulatable elements must allow the payload to be in an “OFF” state, which allows very little or no expression of the payload.

[0176] In one embodiment, the regulatable elements may allow payload expression be turned on and off quickly, and also provide a means by which the level of payload expression can be regulated over a wide range in a dose dependent manner.

[0177] In one embodiment, it may be desirable to provide a regulatable element, which may be induced by a stimulus or drug, which is administered when payload expression is wanted, and removed when the payload expression is no longer needed.

[0178] In one embodiment, the viral genome may comprise the regulatable element. In one embodiments, the regulatable element may be the payload. In one embodiment, the viral genome may comprise one or more regulatable elements and the transgene of interest may be located on a separate viral genome. Various arrangements of the regulatable elements are envisioned as part of the invention described herein. Components can be upstream or downstream of each other within the payload construct or viral genome. In some embodiments, they may be located on more than one payload constructs. In some embodiments the payload is a regulatable element. In a non-limiting example, the payload is a CRISPR regulatable element.

[0179] In some embodiments, viral genome encoding the gene of interest and payload constructs comprising one or more regulatable elements may be on two or more separate payload constructs, packaged into separate AAV particles. In some embodiments, the optimal ratio of the two or more AAV particles needed to achieve the desired expression and regulation must be determined experimentally. In some embodiments, the two or more AAV particles may be administered in equal amounts. In some embodiments, the two or more AAV particles may be administered in unequal amounts. In a non-limiting example, a AAV particle comprising the payload construct encoding the gene of interest, may be delivered at a lower dose than the one or more viral genomes comprising the one or more regulatable elements. In another non-limiting example, a AAV particle comprising the payload construct encoding the gene of interest, may be delivered at a higher dose than the one or more regulatory-AAV particles comprising the one or more regulatable elements.

[0180] In one embodiment, the regulatable element may be positioned within the capsid VP2 domain. The VP2 viral capsid protein may be chosen, since it has been shown to tolerate large insertions. For example, Lux et al. (J Virol. 2005 September; 79(18): 11776-11787; Green Fluorescent Protein-Tagged Adeno-Associated Virus Particles Allow the Study of Cytosolic and Nuclear Trafficking) inserted a 27-kDa GFP protein as a GFP-VP2 fusion protein into an AAV capsid. Incorporation of GFP-VP2 into the AAV capsid did not interfere with viral assembly or viral genome packaging, and the GFP-tagged virions produced in the present study retained infectivity. Since then other studies have used the VP2 capsid as an insertion point, for example for a rapamycin inducible chemical switch, which controls viral infectivity, as described in Hoerner et al., (Chem. Commun., 2014, 50, 10319-10322), the contents of which is herein incorporated by reference in its entirety.

[0181] In some embodiments, the regulatable element may be positioned at the N terminus of VP2. As a non-limiting example, the regulatable element may be located within the first 1%, 2%, 3%, 4%, 5%, 6%, 7%, 8%, 9%, 10%, 15%, 20%, 25%, 30%, 35%, 40%, 45%, 46%, 47%, 48,% or 49% of the VP2 capsid. As another non-limiting example, the regulatable element may be located within the last 1%, 2%, 3%, 4%, 5%, 6%, 7%, 8%, 9%, 10%, 15%, 20%, 25%, 30%, 35%, 40%, 45%, 46%, 47%, 48,% or 49% of the VP2 capsid. As a non-limiting example, the regulatable element may be located in the middle of the VP2 capsid. As another non-limiting example, the regulatable element may be located near the beginning of the VP2 capsid (N terminus). As yet another non-limiting example, the promoter and/or transactivation domain may be located near the end of the VP2 capsid (C terminus).

[0182] In some embodiments, the regulatable element may be made available upon uncoating of the AAV particle, leading to a burst in the expression of the payload. In some embodiments the regulatable element may be released in the nucleus. In some embodiments, the fusion protein comprised in the regulatable element may be released from the VP2 domain through a 2A peptide sequence.

[0183] In one embodiment, the regulatable element may comprise one component. In another embodiment, the regulatable element may comprise two or more components. Without wishing to be bound by theory, a greater number of components may further fine tune the level of control. In some embodiments, the regulatable element components may comprise one or more transcription factors, fusion proteins and/or nucleases or recombinases, CRISPR components, and any combination thereof. In one embodiment, the regulatable element may comprise three or four components. In one embodiment, the regulatable element may comprise at least one protein or fusion protein. In one embodiment, the regulatable element may comprise two or more proteins or fusion proteins. In one embodiment, the one or more regulatable elements may be modulated or regulated by chemical agents (including but not limited to ligands).

[0184] In one embodiment, a hierarchy of regulatable elements may exist, in which for example a first regulatable element regulates the expression of a second regulatable element, which in turn regulates the expression of the payload gene of interest. In some embodiments even more tiers of regulation may be provided. Without wishing to be bound by theory, additional components and/or tiers of regulatable elements may help create a tighter more fine-tuned regulation of payload gene expression.

[0185] In one embodiment, the regulatable element may act on one or more promoters driving expression of one or more payloads. In one embodiment, the promoter may comprise one or more response elements for a transcription factor, which is specific for a particular tissue, or for a fusion protein, which is inducible by a particular chemical agent or physiological stimulus. In one embodiment, the regulatable element may comprise one or more fusion proteins, which comprise one or more of domains selected from a DNA binding domain, a transactivation domain and optionally a ligand binding domain. In one embodiment, payload expression may be induced by a ligand or stimulus in a dose-dependent manner.

[0186] In another embodiment, the regulatable element may regulate the expression of one or more payloads through disruption, e.g., cleavage, of the payload construct(s).

[0187] In one embodiment, the regulatable element may include an siRNA or miRNA, which can bind to the payload construct. In one embodiment, the payload construct may comprise a microRNA binding site. In one embodiment, an siRNA binding site may be present in the payload construct. In one embodiment, the regulatable element may comprise a ribozyme.

[0188] In one embodiment, the regulatable element may comprise a heterologous domain whose function affects the stability of the payload, e.g. stabilizes or destabilizes the payload.

[0189] In one embodiment, the regulatable element may comprise a heterologous domain, whose function may be further regulated or modulated by a ligand that binds to the domain.

[0190] In one embodiment, the regulatable element may comprise a heterologous domain which may be stabilized in the presence of the ligand, and destabilized in the absence of the ligand.

[0191] In another embodiment, the regulatable element may comprise a heterologous domain which may be destabilized in the presence of the ligand, and stabilized in the absence of the ligand.

[0192] In some embodiments, the regulatable element may comprise a heterologous domain which may function to provide burst expression of the payload.

[0193] In some embodiments the, the regulatable element may comprise a heterologous domain which may allow low payload expression levels.

[0194] In one embodiment, the regulatable element may transiently induce the expression of one or more payloads. In one embodiment, the payload expression may be transiently turned off through the regulatable element. In one embodiment, payload expression may be permanently turned on through the regulatable element. In one embodiment, the payload expression may be irreversibly turned off at a desired time. In one embodiment, the payload expression may be reversibly turned on or off. In one embodiment, the regulatable element may also be temporally and spatially regulated.

[0195] In one embodiment, regulatable-AAV particles may comprise at least one regulatable element and/or payloads comprising CRISPR elements, TALEN, or zinc finger nuclease elements.

[0196] In one embodiment, the regulatable element may comprise a component which comprises an endonuclease or recombinase. In one embodiment, the endonuclease or recombinase may be a fusion protein with a site specific DNA binding domain and a cleavage domain.

[0197] In one embodiment, the regulatable element may comprise a CRISPR (Clustered Regularly Interspersed Short Palindromic Repeats) regulatable element.

[0198] In one embodiment, the regulatable-AAV particle comprises a regulatable element where the expression of the protein or fusion protein may be driven by a constitutive promoter.

[0199] In another embodiment, the regulatable-AAV particle comprises a regulatable element where the expression of the protein or fusion protein may be driven by an inducible promoter, which may be induced or repressed in the presence of a ligand.

[0200] In another embodiment, the regulatable-AAV particle comprises a regulatable element where the expression of the protein or fusion protein may be driven by a tissue-specific promoter such that the regulatable element is only expressed in certain tissues.

[0201] In some embodiments, the payload expression occurs in a dose-dependent manner, depending on the dose of the chemical agent or physiological stimulus. Agents and systems must also be tested to ensure that receptors and chemical agents or physiological stimuli have minimal effects on endogenous gene expression and normal cellular responses. A short half-life is also desirable, for fast control of payload expression upon removal of the chemical agent.

[0202] In some embodiments, additional levels of regulation may be added, e.g., additional regulatable elements, may provide even tighter tissue-specific and temporal control of the payload. In some embodiments, two or three or more levels of regulatable elements are provided.

[0203] Various spatial arrangements of the regulatable elements can be envisioned according to the present invention. Components of the regulatable elements can be upstream or downstream of each other. In some embodiments, they may be located on more than one payload constructs. In some embodiments the regulatable elements may be located within one or more viral genomes.

[0204] According to the present invention any of the proteins or fusion proteins described herein, including but not limited to, CRISPR/Cas9, restriction endonucleases, recombinases, integrases, transcriptional activators, transcriptional repressor, dimerization fusion proteins, may be positioned within the VP2 domain. As a non-limiting example, the regulatable element may be a DNA binding domain, and a transactivation domain which may regulate cas9 expression or a DNA binding domain coupled to a transactivating factor, which may regulate cas9 expression. The DNA binding domain may be coupled to the transactivation domain using any methods known in the art or described herein. In one embodiment, the DNA binding domain, which binds to regulatable elements within the cas9 promoter and/or a transactivating factor may be located within the sequence encoding the VP2 capsid. As a non-limiting example, the DNA binding domain and/or transactivation domain may be located within the first 1%, 2%, 3%, 4%, 5%, 6%, 7%, 8%, 9%, 10%, 15%, 20%, 25%, 30%, 35%, 40%, 45%, 46%, 47%, 48,% or 49% of the VP2 capsid. As another non-limiting example, the DNA binding domain and/or transactivation domain may be located within the last 1%, 2%, 3%, 4%, 5%, 6%, 7%, 8%, 9%, 10%, 15%, 20%, 25%, 30%, 35%, 40%, 45%, 46%, 47%, 48,% or 49% of the VP2 capsid. As a non-limiting example, the DNA binding domain and/or transactivation domain may be located in the middle of the VP2 capsid. As another non-limiting example, the DNA binding domain and/or transactivation domain may be located near the beginning of the VP2 capsid (N terminus). As yet another non-limiting example, the promoter and/or transactivation domain may be located near the end of the VP2 capsid (C terminus).

[0205] In another embodiment, any of the regulatable element components described herein may be inserted into the VP1 domain. In another non-limiting example, any of the regulatable element components may be inserted into the VP3 domain.

### Regulatable Elements: Fusion Proteins

[0206] In one embodiment, the regulatable-AAV particle comprises at least one regulatable element that when expressed may comprise a protein or a fusion protein.

[0207] In one embodiment, the regulatable-AAV particle comprises at least one regulatable element that when expressed may comprise one protein or one fusion protein. The protein or fusion protein may be or be part of the Tet ON/OFF system, or the GeneSwitch system or the protein or fusion protein may respond to hormones, physiological stimulus or light.

[0208] In one embodiment, the regulatable-AAV particle comprises at least one regulatable element that when expressed may comprise dimerizable fusion proteins. The protein or fusion protein may respond to hormones, physiological stimulus, rapamycin, or light.

[0209] In one embodiment, the regulatable-AAV particle comprises at least one regulatable element that when expressed may comprise a fusion proteins which has been modified. A non-limiting example of the modifications may alter their ligand binding domains or the modifications can create novel fusion proteins with new binding specificities.

### Single Fusion Proteins

[0210] In one embodiment, the regulatable element, when expressed, may comprise a protein or fusion protein which is capable of driving expression from the promoter of the payload.

[0211] In one embodiment, the regulatable element, when expressed, may comprise a fusion protein which may comprise a DNA binding domain, a transactivation domain and optionally a ligand binding domain.

[0212] In some embodiments, the regulatable element of the regulatable-AAV particle may encode a protein or fusion protein which may require the presence of a chemical agent, such as a ligand, or a physiological stimulus for transcriptional activation to occur. Without wishing to be bound by theory, the protein or fusion protein may either only be able to bind to the promoter in the presence of a chemical agent or physiological stimulus or may only be able to transactivate transcription in the presence of a chemical agent or physiological stimulus. In another embodiment, the fusion protein may only be able to activate transcription in the absence of the chemical agent or stimulus.

[0213] In one embodiment, the regulatable element of the regulatable-AAV particle may encode fusion proteins which may comprise a DNA binding domain. Non-limiting examples of DNA binding domains are helix-turn-helix, zinc finger, leucine zipper, winged helix, winged helix turn helix, helix-loop-helix, HMG-box, Wor3 domain, immunoglobulin fold, B3 domain, TAL effector DNA-binding domains and RNA-guided DNA-binding domains.

[0214] Non-limiting examples of transcription factors, from which these DNA binding domains may be derived from are Ga14, CREB, HSF, ZFHD1, Ecdysone Receptor, Nuclear Receptors, such as glucocorticoid receptor, RXR, RAR, Stat proteins, myc, Tal effectors, LexA, and the like. In one embodiment, the DNA binding domain is a ZFHD1 domain. ZFHD1 is DNA binding domain composed of a zinc finger pair and a homeodomain.

[0215] In some embodiments, the DNA binding domains may be engineered zinc finger proteins. Zinc finger proteins can be engineered to recognize any suitable target site in a promoter, such as the promoter. Methods are known in the art to design or select a zinc finger protein with high specificity and affinity to its target site and are for example described in U.S. Pat. Nos. 6,933,113, 6,933,113, 6,607,882 and 6,777,185, the contents of each of which is herein incorporated by reference in its entirety.

[0216] In one embodiment, the DNA binding domains originate from transcription factors including GAL4, ZFHD1, VP16, VP64 and NFkB (p65).

[0217] In one embodiment, the regulatable element of the regulatable-AAV particle may encode fusion proteins which may comprise a transactivation domain. A non-limiting example of a transactivation domains is the nine-amino-acid transactivation domain. Non-limiting examples of transcription factors from which transactivation domains may be derived from are Ga14, Oafl, Leu3, Rtg3, Pho4, Gln3, Gcn4, p53, RTg3, CREB, Gli3, E2A, HSF1, NF-IL6, myc, NFAT, BP64, B42, NF-κB and VP16, and VP64. In one embodiment, the transactivation domains originate from transcription factors including GAL4, ZFHD1, VP16, VP64 and NFkB (p65).

[0218] In some embodiments, the regulatable element of the regulatable-AAV particle may encode fusion proteins which may comprise a transcriptional repressor domain. In some embodiments, the transcriptional repressor domain may be a KRAB, ERD, or SID transcriptional repressor domain.

[0219] In one embodiment, the regulatable element of the regulatable-AAV particle may encode fusion proteins which may comprise a ligand binding domain. Non-limiting examples of ligand binding domains are those of Ecdysone Receptor, Nuclear Receptors, such as glucocorticoid receptor, RXR, RAR, and modified forms thereof.

### The Tet ON/OFF System

[0220] In one embodiment, the regulatable-AAV particle comprises a regulatable element that when expressed may comprise a tetracycline transactivator protein which is part of the Tet-Off or Tet-On system (first described in Bujard and Gossen (Proc Natl Acad Sci U S A. 1992 Jun. 15; 89(12):5547-51, Tight control of gene expression in mammalian cells by tetracycline-responsive promoters, the contents of which is herein incorporated by reference in its entirety)). The Tet-Off system makes use of the tetracycline transactivator (tTA) protein, which is a fusion protein comprising the E. coli tetracycline repressor TetR and the Herpes Simplex Virus VP16 transactivation domain. The tTA protein is able to bind to DNA at specific TetO operator sequences. In most Tet-Off systems, several repeats of such TetO sequences are placed upstream of a minimal promoter, such as the CMV promoter (tetracycline response element (TRE)). In a Tet-Off system, tetracycline binds to the tetracycline transactivator protein and prevents its binding to TRE, thereby repressing expression of TRE-controlled genes. In the Tet-On system, tetracycline bound tetracycline transactivator protein binds to the TRE and activates transcription, i.e. activation of transcription occurs in the presence of tetracycline only. Doxirubicin is a derivative of tetracycline and also can be used.

[0221] In one embodiment, the viral genome comprises a promoter which may comprise one or more regulatable elements which imparts regulatable or tunable features to regulate the expression of a payload in the presence of tetracycline. In one embodiment, tetracycline may induce payload expression. In another embodiment, tetracycline may reduce payload expression.

[0222] In one embodiment, the regulatable-AAV particle comprises a regulatable element that when expressed may comprise a tetracycline transactivator protein, which binds to the promoter in the presence of tetracycline.

[0223] In one embodiment, the regulatable-AAV particle comprises a regulatable element that when expressed may comprise a tetracycline transactivator protein which in the absence of tetracycline, binds to the promoter.

[0224] In one embodiment, the regulatable-AAV particle comprises a regulatable element that when expressed may comprise a plurality of transactivator binding domains that are spaced such that when bound by transactivators, the transactivators are substantially rotationally aligned about the DNA helix, as described in US Publication No. US20030221203, the contents of which is herein incorporated by reference in its entirety.

[0225] In one embodiment, the viral genome comprises a promoter which may comprise tetracycline resistance operator sequences substantially free of interferon inducible response elements, as described in International Publication No. WO2002070719, the contents of which is herein incorporated by reference in its entirety. In one embodiment, a viral particle (e.g., AAV particle or regulatory-AAV particle) of the present invention may comprise a polynucleotide encoding a payload driven by a promoter and a second polynucleotide encoding a tetracycline-controlled transactivator driven by a regulatable element promoter. The two promoters may drive expression in opposite directions, towards each other and away from the inverted terminal repeats, as described in U.S. Pat. Nos. 7,811,814 and 7,456,015, the contents of each of which is herein incorporated by reference in its entirety. In another embodiment, the two promoters may drive expression in the same direction. As a non-limiting example, the payload may have a therapeutic effect on a nervous system disorder.

### Hormone Responsive Systems

[0226] In one embodiment, the regulatable-AAV particles comprise an inducible expression system. Several inducible expression systems utilize steroid response switches using non-human analogs to regulate expression. These systems comprise modular recombinant receptor fusion proteins consisting of mutated ligand-binding domains fused to appropriate transcription factor DNA-binding and activation domains. The receptor fusion proteins can be constitutively expressed and activate transcription of their target genes when a ligand is present and binds to it. For example, a chimeric Drosophila/Bombyx ecdysone receptor (DB-EcR), which is able to bind a modified ecdysone promoter and which achieved transactivation of a reporter gene in the presence of ecdysone agonist GS-E, is described in Hoppe et al. (Mol Ther. 2000 February; 1(2):159-64, the contents of which is herein incorporated by reference in its entirety).

[0227] In some embodiments, the viral genome comprises a promoter which may comprise response elements which may be regulated by a steroid response switch using non-human analogs, including but not limited to Ecdysone. In some embodiments, the regulatable element may comprise or encode a chimeric ecdysone receptor.

[0228] In some embodiments, the ecdysone receptor binding domain may be selected from, but is not limited to, an invertebrate ecdysone receptor ligand binding domain, an Arthropod ecdysone receptor ligand binding domain, a Lepidopteran ecdysone receptor ligand binding domain, a Dipteran ecdysone receptor ligand binding domain, an Orthopteran ecdysone receptor ligand binding domain, a Homopteran ecdysone receptor ligand binding domain, a Hemipteran ecdysone receptor ligand binding domain, a spruce budworm Choristoneura fumiferana ecdysone receptor ligand binding domain, a beetle Tenebrio molitor ecdysone receptor ligand binding domain, a Manduca sexta ecdysone receptor ligand binding domain, a Heliothies virescens ecdysone receptor ligand binding domain, a midge Chironomus tentans ecdysone receptor ligand binding domain, a silk moth Bombyx mori ecdysone receptor ligand binding domain, a squinting bush brown Bicyclus anynana ecdysone receptor ligand binding domain, a fruit fly Drosophila melanogaster ecdysone receptor ligand binding domain, a mosquito Aedes aegypti ecdysone receptor ligand binding domain, a blowfly Lucilia capitata ecdysone receptor ligand binding domain, a blowfly Lucilia cuprina ecdysone receptor ligand binding domain, a Mediterranean fruit fly Ceratitis capitata ecdysone receptor ligand binding domain, a locust Locusta migratoria ecdysone receptor ligand binding domain, an aphid Myzus persicae ecdysone receptor ligand binding domain, a fiddler crab Celuca pugilator ecdysone receptor ligand binding domain, an ixodid tick Amblyomma americanum ecdysone receptor ligand binding domain, a whitefly Bamecia argentifoli ecdysone receptor ligand binding domain and a leafhopper Nephotetix cincticeps ecdysone receptor ligand binding domain.

[0229] In some embodiments, the regulatable-AAV particle comprises a regulatable element that expresses a steroid hormone receptor transactivation fusion protein.

[0230] In one embodiment, the steroid hormone receptor transactivator fusion protein may comprise a glucocorticoid receptor. In some embodiments the promoter may comprise one or more glucocorticoid response elements (GRE). In some embodiments, the promoter may be inducible through steroids, such as dexamethasone.

[0231] In some embodiments, the regulatable-AAV particle comprises a regulatable element that when expressed may comprise a glucocorticoid receptor as described in US Publication No. US20030031650, the contents of which is herein incorporated by reference in its entirety.

[0232] In one embodiment, the regulatable-AAV particle comprises a regulatable element that expresses a tamoxifen dependent expression system.

[0233] In one embodiment, payload expression may be regulated by tamoxifen through a tamoxifen dependent expression system.

[0234] In some embodiments, the regulatable-AAV particle comprises a regulatable element that when expressed may comprise a tamoxifen regulatable fusion protein, which can bind to regulatable elements in the promoter. In some embodiments, the tamoxifen regulatable fusion protein may comprise a DNA binding domain, a tamoxifen binding domain, and/or a transactivation domain. As a non-limiting example, Roscilli et al., 2002 (Mol Ther. 2002 November; 6(5):653-63. Long-term and tight control of gene expression in mouse skeletal muscle by a new hybrid human transcription factor, the contents of which is herein incorporated by reference in its entirety), describes a hydroxytamoxifen (4-OHT)-dependent fusion protein comprising the DNA binding domain of the human hepatocyte nuclear factor-lalpha (HNF1alpha), which is not expressed in muscle cells, a G(521)R mutant of the ligand binding domain of human estrogen receptor-alpha (ERalpha), and the activation domain derived from human nuclear factor-kappaB p65 subunit (NF-kappaB p65). Efficient expression in muscle cells was achieved from a promoter containing multimeric HNFlalpha binding sites in the presence of ligand.

[0235] In one embodiment, the regulatable-AAV particle comprises a regulatable element that expresses an inducible system that utilizes endogenous receptors and/or steroid hormones. In some embodiments, a payload may be regulated by an inducible system that utilizes endogenous receptors and/or steroid hormones. For example, Spiga and Borras (IONS, 2010, Vol. 51, No. 6, Development of a Gene Therapy Virus with a Glucocorticoid-Inducible MMP1 for the Treatment of Steroid Glaucoma, the contents of which is herein incorporated by reference in its entirety), describe a glucocorticoid-inducible vector that expresses transgene in the presence of dexamethasone, which may have utility in the treatment of steroid-induced glaucoma resulting from the use of steroids in the treatment of macular edema.

[0236] In one embodiment, the regulatable-AAV particle comprises a regulatable element that expresses a combination of endogenous receptor and endogenous or exogenous ligands. In some embodiments, payload expression may be regulated through the combination of endogenous receptor and endogenous or exogenous ligands.

### The GeneSwitch System

[0237] In one embodiment, the regulatable-AAV particle comprises a regulatable element that expresses the GeneSwitch System (Life Technologies). The GeneSwitch System is a mifepristone-inducible mammalian expression system originally described in Wang, Y., B.W. O'Malley, J., Tsai, S. Y., and O'Malley, B. W. (1994), A Regulatory System for Use in Gene Transfer. Proc. Natl. Acad. Sci. USA 91, 8180-8184, the contents of which is herein incorporated by reference in its entirety. The system comprises a hybrid regulatory protein containing a DNA binding domain from the yeast GAL4 protein, a truncated ligand binding domain from the human progesterone receptor, and an activation domain from the human NF-κB protein. This fusion protein binds to the synthetic steroid, mifepristone, and functions as a ligand-dependent transcription factor to induce expression of the gene of interest as well as its own expression. Transgene expression is controlled by a hybrid promoter consisting of Saccharomyces cerevisiae GAL4 upstream activating sequences.

[0238] In one embodiment, the regulatable-AAV particle comprises a regulatable element which imparts regulatable or tunable features to regulate the expression of a payload in the presence of mifepristone.

[0239] In one embodiment, the regulatable-AAV particle comprises at least one regulatable element that when expressed may comprise a fusion protein as described in Wang et al. (described above, the contents of which is herein incorporated by reference in its entirety).

[0240] In one embodiment, payload expression may be regulated simultaneously on the transcriptional and a post-translational level. The regulatable element may be inducible through a first ligand, such as for example mifepristone, thereby driving expression of the payload. The payload, in turn, must dimerize upon administration of a second ligand to be activated. Without wishing to be bound by theory, allowing two levels of regulation may provide for tighter control of payload expression. A non-limiting example of a double inducible system according to the present invention is described in US Publication No. US20090293139, the contents of which is herein incorporated by reference in its entirety.

[0241] In one embodiment, the regulatable-AAV particle comprises a regulatable element that when expressed may comprise a fusion protein comprising the bacterial repressor LexA. While not wishing to be bound by theory, LexA does not resemble eukaryotic transcription factors and is thus less likely to bind to endogenous promoters. LexA binding sites can be inserted into the promoter driving the gene of interest.

[0242] In one embodiment, the viral genome comprises a promoter may comprise one or more LexA binding sites. In one embodiment, the regulatable element may comprise a fusion protein comprising the DNA binding domain of a bacterial LexA protein, a truncated ligand binding domain of a human progesterone receptor and an activation domain of the p65 subunit of human NF-kappaB. In one embodiment, the payload expression may be mifepristone-inducible.

[0243] In one embodiment, the regulatable-AAV particle comprises a regulatable element that when expressed may comprise the fusion protein described in U.S. Pat. No. 8,852,928, the contents of which is herein incorporated by reference in its entirety.

[0244] In one embodiment, the regulatable-AAV particle comprises a regulatable element that when expressed may comprise a fusion protein comprising a mutated GAL4 binding domain, which decreases dimerization of the regulator protein occurring in the absence of a anti-progestin ligand, as described in U.S. Pat. No. 7,579,326, the contents of which is herein incorporated by reference in its entirety.

### Physiological Stimulus Inducible Systems

[0245] In some embodiments, the expression of the payload may be induced by a physiological or other stimulus.

[0246] In one embodiment, the regulatory-AAV particle may comprise one or more regulatable elements which imparts regulatable or tunable features to regulate the expression of a payload in the presence of a physiological or chemical stimulus. These stimuli may include, but are not limited to, light, heat, radiation, glucose levels, hypoxia, or metals.

[0247] In some embodiments, the expression of the payload may be regulated by light. As a non-limiting example, Ye H, et al. (Science. 2011 Jun. 24; 332(6037):1565-8, the contents of which is herein incorporated by reference in its entirety) describe a system, in which the expression of a transgene under control of a NFAT-dependent promoter can be driven by illumination and can be regulated over time simply by modulating the patterns of light over periods of hours to days.

[0248] In one embodiment, the viral genome comprises a promoter which may comprise one or more NFAT binding elements as described in Ye H., et al. (described above, the contents of which is herein incorporated by reference in its entirety).

[0249] In some embodiments, the payload may be induced in the context of radiation therapy, e.g. in the context of a cancer therapy regimen. In one embodiment, the expression of the payload may be dependent on a radiation-inducible promotor. Non-limiting examples of promoters that can be used are Egr-1, VEGF, Rec-A, and WAF-1 promoters (see e.g., Goverdhana et al., 2005, Mol Ther. 2005 August; 12(2): 189-211, the contents which is herein incorporated by reference in its entirety, and references therein). While not wishing to be bound by theory, using these types of promoters provide the potential to restrict expression to the tissue receiving the radiation therapy, while expression in the adjacent, healthy tissue is not induced.

[0250] In some embodiments, the expression of the payload may be driven by glucose regulatable elements in the promoter. In a non-limiting example, glucose regulatable elements may be useful to drive an insulin payload.

[0251] In some embodiments, the expression of the payload may be regulated by hypoxia regulatable element. While not wishing to be bound by theory, the hypoxia regulatable element binds HIF-1 alpha and beta (hypoxia inducible factor), which permits the selective induction of gene expression in a hypoxic environment. This phenomenon may be exploited in a cancer setting. In one study, a rAAV was generated in which the transgene can be regulated by hypoxia in human brain tumors (Kantor et al., the contents of each which is herein incorporated by reference in its entirety, and references therein).

[0252] In one embodiment, the expression of the payload may be regulated by a metal regulatable element. Metal regulatable elements can be found within promoters of metallothionin genes which are recognized by the transcription factor MTF-1 (see e.g., Daniels et al., 2002 (Nucl. Acids Res. 2002 Vol 30, No. 14), the contents of which is herein incorporated by reference in its entirety). In some embodiments, the DNA binding domain of MTF or binding factor of another metal regulatable element may be used in a combination with a metal in an inducible system to regulate payload expression.

[0253] In one embodiment, the payload expression may be regulated by a heat shock regulatable element and binding heat shock regulatable element binding protein, either in the context of endogenous expression of proteins as part of the heat shock response, or as part of an artificial system including heat shock response elements and a protein or fusion protein which comprises a heat shock factor DNA binding domain.

[0254] In one embodiment, the viral genome comprises a promoter which may comprise elements of a heat shock promoter. Non-limiting examples of the heat shock protein (HSP) promoters include HSP70, HSP90, HSP60, HSP27, HSP72, HSP73, HSP25 and HSP28, or ubiquitin promoter as described in U.S. Pat. No. 7,285,542, the contents of which is herein incorporated by reference in its entirety. A minimal heat shock promoter derived from HSP70 may also be used. The conditions which activate the heat shock promoter are hyperthermic conditions, which may comprise a temperature between about basal temperature and about 42° C. In one embodiment, a viral genome comprises a heat shock promoter such as the promoters described in U.S. Pat. No. 7,595,386, the contents of which is herein incorporated by reference in its entirety.

[0255] In one embodiment, a pulsatile signal may be applied with a stimulator to modulate the transcription of a gene of interest in the target tissue. In one embodiment, the tissue is neural tissue. In one aspect, the neural tissue is brain tissue.

[0256] In one embodiment, the viral genome comprises a promoter which may comprise one or more regulatable sequences that respond to a pulsatile stimulus. Such pulsatile stimulus responsive regulatable sequences may be identified as described in US20070059290, the contents of which is herein incorporated by reference in its entirety. In some embodiments, payload expression may be activated through the pulsatile stimulus. In some embodiments, payload expression may be repressed through the pulsatile stimulus.

### Light Inducible Single Fusion Proteins

[0257] In one embodiment, the regulatory-AAV particle may comprise one or more regulatable elements which imparts regulatable or tunable features to regulate the expression of a payload in the presence of a light stimulus.

[0258] In one embodiment, the regulatory-AAV particle may comprise one or more regulatable elements which imparts regulatable or tunable features to regulate the expression of a payload in the presence of a blue light. Expression of only a single fusion protein can be used to directly activate transcription of the payload in response to blue light. The light-responsive DNA-binding protein (LRDP) can be provided containing both a light-oxygen-voltage (LOV) domain and DNA-binding domain, which is fused to a transcriptional activation domain, as described in US Publication No. US20140325692, the contents of which is herein incorporated by reference in its entirety.

[0259] In one embodiment, the regulatable element, when expressed, is a light responsive, LOV domain containing DNA binding protein with a transactivation domain, as described in US Publication No. US20140325692, the contents of which is herein incorporated by reference in its entirety.

[0260] In one embodiment, the regulatable element, when expressed, comprises a light inducible fusion protein. As a non-limiting example, the light inducible fusion protein is a E. litoralis 222 amino acid protein (EL222)-VP16 chimera.

### Dimerizable Fusion Proteins

[0261] In one embodiment, the regulatable-AAV comprises a regulatable element which may comprise two or more fusion proteins which may further fine tune the level of control over the payload expression.

[0262] In one embodiment, the regulatable-AAV comprises a regulatable element which when expressed comprises two fusion proteins, each of which comprise a dimerization ligand binding domain. In one embodiment, the first fusion protein may contain a DNA-binding domain of a transcription factor, which binds to the promoter driving expression of the payload, fused to a dimerization ligand binding domain. In one embodiment, the second fusion protein may contain a transactivation domain fused to a dimerization ligand binding domain. In one embodiment, the transactivation domain may be capable of activating the transcription factor, which binds to the promoter in the viral genome.

[0263] In one embodiment, the regulatable-AAV comprises a regulatable element which when expressed comprises the dimerization ligand binding domain may require the binding of a chemical agent or physiological stimulus in order for dimerization to occur. In some embodiments, the dimerization ligand binding domains of the two fusion proteins may not be able to bind to each other in the absence of the chemical agent or physiological stimulus. In some embodiments, the chemical agent or physiological stimulus may result in the dimerization of two fusion proteins and subsequent recruitment of the trans activation domain to the promoter in the payload construct. In some embodiments, both fusion proteins may bind simultaneously to the same chemical agent. In other embodiments, both fusion proteins may bind separately to the same or two different chemical agents. In another embodiment, no such chemical agent or physiological stimulus is required for one or both fusion proteins.

[0264] In some embodiments, the viral genome comprises a minimal promoter containing DNA binding elements to which the DNA binding domain binds, and transcription from the promoter may only occur in the presence of the chemical agent or stimulus.

[0265] In one embodiment, a constitutive promoter drives the expression of the regulatable element encoding the one or more fusion proteins. In another embodiment, at least one component of the regulatable element is driven by an inducible promoter. In another embodiment, the expression of all components of the regulatable element are driven by inducible promoters which may the same or different and be inducible or repressible by the same or by different chemical agents or ligands. In another embodiment, the promoter may drive tissue specific expression, such that the regulatable element is only expressed in certain tissues.

[0266] In one embodiment, the regulatable-AAV comprises a regulatable element which when expressed may comprise inducible systems such as, but not limited to, the ecdysone or rapamycin inducible systems.

### Hormone Inducible Systems

[0267] In one embodiment, the regulatory-AAV particle may comprise one or more regulatable elements which imparts regulatable or tunable features to regulate the expression of a payload in the presence of a hormone inducible system. Non-limiting examples of hormone inducible systems include steroid small molecules, Ecdysone inducible systems and/or the Rheoswitch system.

[0268] In one embodiment, the expression of the payload may be regulated through a non-steroid small molecule including, but not limited to, Ecdysone.

[0269] In one embodiment, the regulatable-AAV particle comprises a regulatable element that when expressed may encode an ecdysone inducible system. An Ecdysone inducible system is described in No et al., Proc Natl Acad Sci U S A. 1996 Apr. 16; 93(8):3346-51, the contents of which is herein incorporated by reference in its entirety. The system comprises a system with a modified ecdysone receptor fusion protein with a GAL4 DNA binding domain, VpEcR, and heterodimeric partner fusion protein, RXR with a VP16 transactivation domain. Upon expression of RXR and VpEcR fusion proteins, the two receptors can heterodimerize and transactivate the EcRE-containing promoter, but only in the presence of the insect hormone ecdysone.

[0270] In one embodiment, the viral genome comprises a promoter which may comprise one or more regulatable elements suitable for the ecdysone inducible system. In one embodiment, the regulatable element when expressed may comprise a modified ecdysone receptor fusion protein with a GAL4 DNA binding domain, and RXR with a VP16 transactivation domain as a heterodimeric partner fusion protein. In one embodiment, the regulatable element when expressed may comprise one or more fusion proteins which are part of the multiple inducible gene regulation system described in U.S. Pat. No. 8,105,825, assigned to Intrexon, the contents of which is herein incorporated by reference in its entirety. In one embodiment, the ligand which induces the regulatable element may be described in U.S. Pat. No. 8,105,825 assigned to Intrexon.

[0271] In one embodiment, the regulatable-AAV particle comprises a regulatable element that when expressed may encode an Ecdysone inducible systems such as, but not limited to, the Rheoswitch system (Intrexon). In the Rheoswitch system controlled expression of the gene of interest is activated by the RheoSwitch® receptor (a heterodimer of an engineered ecdysone receptor ligand binding domain fused to a GAL4 DNA binding domain (GAL4:EcR) and a retinoid X receptor (RXR) protein fused to a VP16 activation domain (VP16:RXR)) only in the presence of an activator drug, as described in Karzenowski et al., 2006, Molecular Therapy (2006) 13, S194-S194, the contents of which is herein incorporated by reference in its entirety. While not wishing to be bound by theory, the small molecule ligand or activator drug, such as Intrexon's synthetic diacylhydrazine molecule veledimex or analogs thereof, triggers the conformational changes needed to activate transcription. Additionally, the ecdysone may demonstrate safety in mammals because the chemical agents or ligands are designed to activate the insect ecdysone receptor rather than mammalian receptors thus avoiding potential off target effects.

[0272] In one embodiment, the regulatable element when expressed may comprise a Rheoswitch system. In one embodiment, the regulatable element when expressed may comprise an ecdysone receptor fusion protein and a heterodimeric partner fusion protein. In some embodiments, the fusion proteins are those described in No et al. or derivatives thereof. In some embodiments, the fusion proteins are those described in Karzenowsiki et al. In one embodiment, the fusion proteins are ecdysone regulatable. In one embodiment, the fusion proteins are regulatable by a diacylhydrazine molecule or an analog thereof. In one embodiment, the chemical agent or ligand may be administered orally.

[0273] In one embodiment, the regulatable element when expressed may comprise a first fusion protein comprising a DNA-binding domain and an ecdysone receptor ligand binding domain; and a second fusion protein a transactivation domain and a chimeric RXR ligand binding domain comprising a vertebrate RXR amino acid sequence and an invertebrate RXR amino acid sequence, as described in U.S. Pat. No. 8,598,409, the contents of which is herein incorporated by reference in its entirety.

### Rapamycin Inducible Systems

[0274] In one embodiment, the regulatory-AAV particle may comprise one or more regulatable elements which imparts regulatable or tunable features to regulate the expression of a payload in the presence of a rapamycin inducible system. The rapamycin inducible system takes advantage of the dimerizing function of the antibiotic rapamycin, which links FK506-binding protein (FKBP) and FKBP12-rapamycin-associated protein (FRAP). FKBP contains the DNA-binding domain, such as ZFHD, while the activation domain of NF-κB p65 is fused to FRAP. The promoter containing the target DNA sequence is only induced when the two are dimerized by the action of rapamycin or alternative analogues (e.g. Kantor et al., and references therein). In one embodiment, the promoter may have a target sequence suitable for regulation through this system.

[0275] In one embodiment, the regulatable element when expressed may comprise a rapamycin regulatable element. In one embodiment, the regulatable element when expressed may comprise a rapamycin or rapamycin analog regulatable DNA binding domain fusion protein and a transactivation domain fusion protein, each of which comprise a rapamycin or analog binding domain. As a non-limiting example, the rapamycin or analog binding domain comprised in both the DNA binding domain fusion protein and transactivation domain fusion proteins may be FKBP (FK506-binding protein). FKBP is an abundant 12 kDa cytoplasmic protein that acts as the intracellular receptor for the immunosuppressive drugs FK506 and rapamycin. As described in US Publication No. US20130023033, the contents of which is herein incorporated by reference in its entirety, and references therein, one or more copies of FKBP may be fused to a DNA binding domain and a transactivation domain of a transcription factor. While not wishing to be bound by theory, they will dimerize upon addition of FK1012 (a homodimer of FK506).

[0276] As another non-limiting example, the rapamycin or analog binding domain in the DNA binding domain fusion protein and the activation domain fusion protein may be derived from two different proteins, allowing FK506 and rapamycin to promote heterodimerization. Without wishing to be bound by theory, heterodimerization more closely follows their natural mechanism of action.

[0277] Examples of dimerization domains/ligand binding domains useful in the rapamycin system include but are not limited to FKBP, calcineurin A, minimal calcineurin domain termed a CAB, and FRAP (mTOR, e.g., amino acids 2021-2113) as described in US Publication No. US20130023033, the contents of each of which is herein incorporated by reference in its entirety, and references therein. In some embodiments, the FRAP sequence may incorporate the single point-mutation Thr2098Leu (FRAP L) to allow use of certain nonimmunosuppressive rapamycin analogs (rapalogs).

[0278] In some embodiments, the dimerization domains/ligand binding domain may be N-terminal, C-terminal, or interspersed with respect to the DNA binding domain and activation domain. In some embodiments, the fusion proteins may comprise multiple copies of a dimerization domains/ligand binding domain, e.g. 2, 3 or 4 copies. The various domains of the fusion proteins may be connected to each other by linkers.

[0279] In some embodiments FRAP may be fused to a transactivator portion of human NF-KB p65 (190 amino acids) and FKBP may be fused to a ZFHD DNA binding domain as described in US Publication No. US20130023033, the contents of which is herein incorporated by reference in its entirety. In some embodiments the FKBP-ZFHD fusion protein may contain one, two, three, four or more copies of FKBP.

[0280] Suitable compounds for use in this system are disclosed in US Patent Publication No. US20130023033, incorporated herein by reference in its entirety, and references therein. Non-limiting examples of compounds include rapamycin, FK506, FK1012 (a homodimer of FK506), rapamycin analogs (“rapalogs”) which modified to add a “bump” that reduces or eliminates affinity for endogenous FKBP and/or FRAP, including, but not limited to, AP26113 (Ariad), AP1510, AP22660, AP22594, AP21370, AP22594, AP23054, AP1855, AP1856, AP1701, AP1861, AP1692 and AP1889.

[0281] In one embodiment, the regulatable element when expressed may comprise a chemically induced system as described in US Patent Publication No. US20130023033, the contents of which is herein incorporated by reference in its entirety. In one embodiment, the domains used in the present invention may be the domains of or derived from those described in US Publication No. US20130023033. In some embodiments the domains may be those or derived from the Ariad ARGENT® system as described in US Publication No. US20130023033, and references therein, including in U.S. Pat. Nos. 5,834,266 and 7,109,317, US Publication No. 20020173474, U.S. Publication No. 200910100535, U.S. Pat. Nos. 5,834,266, 7,109,317, 7,485,441, 5,830,462, 5,869,337, 5,871,753, 6,011,018, 6,043,082, 6,046,047, 6,063,625, 6,140,120, 6,165,787, 6,972,193, 6,326,166, 7,008,780, 6,133,456, 6,150,527, 6,506,379, 6,258,823, 6,693,189, 6,127,521, 6,150,137, 6,464,974, 6,509,152, 6,015,709, 6,117,680, 6,479,653, 6,187,757, 6,649,595, 6,984,635, 7,067,526, 7,196,192, 6,476,200, 6,492,106, WO199418347, WO199620951, WO199606097, WO199731898, WO199641865, WO199802441, WO199533052, WO1999110508, WO1999110510, WO199936553, WO199941258, WO2001114387, ARGENT™ Regulated Transcription Retrovirus Kit, Version 2.0 (9109102), and ARGENT™ Regulated Transcription Plasmid Kit, Version 2.0 (91 0902), each of which is incorporated herein by reference in its entirety.

[0282] In some embodiments, ligands for use in these inducible systems may be or be any of those described in U.S. Pat. Nos. 5,834,266 and 7,109,317, US Publication No. 20020173474, US Publication No. 200910100535, U.S. Pat. Nos. 5,834,266, 7,109,317, 7,485,441, 5,830,462, 5,869,337, 5,871,753, 6,011,018, 6,043,082, 6,046,047, 6,063,625, 6,140,120, 6,165,787, 6,972,193, 6,326,166, 7,008,780, 6,133,456, 6,150,527, 6,506,379, 6,258,823, 6,693,189, 6,127,521, 6,150,137, 6,464,974, 6,509,152, 6,015,709, 6,117,680, 6,479,653, 6,187,757, 6,649,595, 6,984,635, 7,067,526, 7,196,192, 6,476,200, 6,492,106, International Publication No. WO199418347, International Publication No. WO199620951, International Publication No. WO199606097, International Publication No. WO199731898, International Publication No. WO199641865, International Publication No. WO199802441, International Publication No. WO199533052, International Publication No. WO1999110508, International Publication No. WO1999110510, International Publication No. WO199936553, International Publication No. WO199941258, International Publication No. WO2001114387, the contents of each of which is incorporated herein by reference in its entirety.

[0283] In one embodiment, the regulatable element when expressed may comprise a first fusion protein and a second fusion protein, which both contain a dimerization domain and can be induced to associate with each other through binding of a ligand. In one embodiment, the first and second fusion protein may be any of those described in U.S. Pat. Nos. 6,165,787, 6,011,018, 5,869,337, US Publication No. US20090060888, U.S. Pat. No. 6,046,047, European Publication No. EP1978095, European Publication No. EP0804561, U.S. Pat. Nos. 6,140,120 and 6,063,625, the contents of each of which is herein incorporated by reference in its entirety. In one embodiment, the ligand may be any of the ligands described in U.S. Pat. Nos. 6,165,787, 6,011,018, 5,869,337, US Publication No. US20090060888, U.S. Pat. No. 6,046,047, European Publication No. EP1978095, European Publication No. EP0804561, U.S. Pat. No. 6,140,120 and U.S. Pat. No. 6,063,625, the contents of each of which are herein incorporated by reference in its entirety.

[0284] In one embodiment, the regulatable element when expressed may comprise a rapamycin analog AP21967 regulatable transcription factor as described in International Publication No. WO2006063247, the contents of which is herein incorporated by reference in its entirety. In one embodiment, the payload may comprise a therapy for a neurological disorder.

[0285] In one embodiment, the viral genome comprises a promoter which may be inducible through a rapamycin inducible system, wherein the two rapamycin inducible fusion proteins of the regulatable element are under control of a tissue specific promoter. Such a system is for example described in Chen et al., 2013 (Hum Gene Ther Methods. 2013 August; 24(4): 270-278. Enhancing the Utility of Adeno-Associated Virus Gene Transfer through Inducible Tissue-Specific Expression), in which the transcription factor domains under the control of either a heart-specific promoter (cardiac troponin T, cTnT) or a liver-specific promoter (thyroxine-binding globulin, TBG).

### Light Inducible Systems

[0286] In one embodiment, the regulatory-AAV particle may comprise one or more regulatable elements which imparts regulatable or tunable features to regulate the expression of a payload encoding dimerizable fusion proteins in the presence of a light stimulus.

[0287] In one embodiment, the regulatable element when expressed may comprise a DNA binding fusion protein and a transactivating fusion protein, both of which comprise a light inducible dimerization domain. Any of the light inducible domains described in Jinek et al., A programmable dual-RNA-guided DNA endonuclease in adaptive bacterial immunity. 2012 Aug. 17; 337(6096):816-21, the contents of which is herein incorporated by reference in its entirety, may be used.

### Modified Fusion Proteins

[0288] In one embodiment, the regulatory-AAV particle may comprise one or more regulatable elements which imparts regulatable or tunable features to regulate the expression of a payload encoding modified fusion proteins. Fusion proteins can be modified, e.g. in their ligand binding domains or novel fusion proteins can be developed with new binding specificities, according to methods well known in the art. Dimerization domains and ligands or compounds that bind to them may be readily identified using methods and compound characteristics known in the art, for example, described in US Publication No. US20130023033, the contents of which is herein incorporated by reference in its entirety. The design of fusion proteins for modulation of gene expression, has been described, for example in Salis and Kaznessis; Phys Biol. 2006 Dec. 22; 3(4):295-310. “Computer-aided design of modular protein devices: Boolean AND gene activation.” Techniques for the creation of novel fusion proteins are well known in the art, for example as described in Zhu et al., BioTechniques, Vol. 43, No. 3, September 2007, pp. 354-359, the contents of which is herein incorporated by reference in its entirety.

[0289] Chemical libraries of ligands can be panned against these modified or new fusion receptors to identify new ligands with the desired binding affinities. These ligands can then be tested for their physical and pharmacological properties (e.g., affinity, biodistribution, toxicology, half-life, etc.).

[0290] In addition, fusion proteins should be extensively tested to ensure their binding specificity and to avoid off-target effects. The DNA binding domain, and the corresponding fusion protein should bind to DNA sequence element with specificity and affinity as compared to other sequences, such as host genomic sequences. This means that the DNA binding domain binds much more strongly to the response element than to any other sequence presented in in vitro binding studies.

### Regulatable Elements: Endonucleases, Recombinases and Restriction Enzymes

[0291] In one embodiment, the regulatable-AAV particle comprises at least one regulatable element that when expressed may comprise an enzyme.

[0292] In some embodiments, the regulatable element when expressed comprises an enzyme such as an endonuclease, recombinase, restriction enzyme or related enzyme which can function to turn off payload expression. For example, the enzyme may comprise a meganuclease, a zinc finger nuclease, a recombinase, an integrase, a TALEN, CRISPR Cas9 enzyme or a restriction enzyme specific to a sequence that rarely occurs in the human genome.

[0293] In one embodiment, the viral genome may comprise one or more recognition sites specific to the endonuclease or recombinase encoded by the regulatable element, such that expression of the payload can be turned off upon expression of the regulatable element. Such one or more recognition sites may be located in or may be flanking one or more regions of the payload construct. As used herein, “payload construct regions” include the 5′ITR, the region downstream of the 5′ITR and upstream of the promoter, the promoter, the 5′UTR (which is located 3′ of the promoter and 5′ of the coding sequence), the coding sequence, the payload 3′UTR (which is located 3′ of the coding sequence and 5′ of the ITR and which optionally comprises a polyadenylation site), the region downstream of the 3′UTR and upstream of the 3′ITR, and the 3′ITR.

[0294] In one embodiment, the one or more sites may be located in the promoter region. In another embodiment, the one or more recognition sites may be located within the coding region. In another embodiment, the one or more recognition sites may be located in the 5′UTR region. In another embodiment, the one or more recognition sites may be located within the 3′UTR region. In another embodiment, the one or more recognition sites may be located in a region 3′ of the 5′ITR and 5′ of the promoter. In another embodiment, the one or more recognition sites may be located in a region 3′ of the 3′ UTR and 5′ of the 3′ ITR. The locations of the one or more recognition sites are not limited to any particular position within each of these regions and can be at any position within the regions, i.e., at the 5′ end, and the 3′ end or in the middle of a region.

[0295] In one embodiment, two or more different types of recognition sites may be present within or flanking any of the regions of the payload construct. In a non-limiting example, these sites may be recognized by different enzymes or fusion proteins. In a non-limiting example, these sites may be recognized by two or more different types of recombinases and may be in the same or in a different orientation. In another non-limiting example, these sites may be recognized by two or more different single guide RNAs (sgRNAs).

[0296] In some embodiments, the regulatable-AAV particle comprises a regulatable element that when expressed may comprise at least one enzyme which may be a chimeric enzyme or fusion protein, wherein the nuclease has at least two domains comprising a sequence specific DNA binding domain and a catalytic domain. In one embodiment, these are expressed independently of each other and are on separate polypeptide chains. In one embodiment, heterodimerization is inducible, e.g. through ligand binding or a physiological stimulus. In another embodiment, the at least two domains are on one polypeptide chain. The polypeptide chains can be arranged in various ways such that the domains may be N terminal or C terminal with respect to each other, and may be encoded upstream or downstream of each other.

[0297] The enzymes must be extensively tested to ensure their binding specificity and avoid off-target effects, according to methods know in the art. The DNA binding domain should bind to the appropriate DNA sequence element, e.g., within the payload construct, with specificity and affinity as compared to other sequences, such as host genomic sequences. This means that the DNA binding domain binds much more strongly to the response element than to any other sequence presented in in vitro binding studies.

[0298] In one embodiment, an inducible promoter drives the expression of the regulatable element encoding one or more enzymes or fusion proteins. As a non-limiting example, any of the regulatable elements described herein may be useful in regulating the enzyme. In another embodiment, the promoter of the regulatable element encoding the one or more enzymes drives tissue specific expression, such that the regulatable element is only expressed in certain tissues.

[0299] In one embodiment, a constitutive promoter drives the expression of the regulatable element encoding the endonuclease.

### CRE/LoxP Recombinase and CRE/LOXP System

[0300] In one embodiment, the regulatable-AAV particle comprises at least one regulatable element that when expressed may comprise a CRE/Lox recombinase. In one embodiment, the viral genome may comprise one or more CRE/Lox regulatable elements, i.e., Lox sites. In one embodiment, the viral genome may comprise two Lox sites. In some embodiment, the viral genome may comprise 2, 3, 4, 5, 6 or more Lox sites.

[0301] In some embodiments, the recombinase recognition sites may be LoxP sites. In some embodiments, variant LoxP sequences, for example Lox2272 and LoxN may also be used. Lox variants are known in the art and are for example described in Missirlis et al. (A high-throughput screen identifying sequence and promiscuity characteristics of the LoxP spacer region in Cre-mediated recombination, BMC Genomics. 2006; 7: 73), the contents of which is herein incorporated by reference in its entirety.

[0302] In some embodiments herein, there may be at least one pair of identical Lox sequences in the viral genome. While not wishing to be bound by theory, Cre recombinase typically cannot induce recombination between a pair of non-identical Lox sites, so that a pair of identical Lox sites (e.g. two LoxP sites, or two Lox2272 sites) must be present for recombination to occur.

[0303] The Cre recombinase recognizes 34 bp LoxP sites, whose orientation and location relative to each other determine the way in which the genetic material is rearranged. If the LoxP sites are in opposite orientation to each other on the same DNA strand, recombination results in the inversion of the DNA in between the two sites. If the sites are in the same orientation, the recombination event will result in a deletion; this orientation results in the excision of the sequence as a circular DNA. If the sites are not on the same DNA strand, the recombination will result in a translocation at the LoxP sites.

[0304] In one embodiment, the LoxP sites may be in opposite orientation relative to each other on the same DNA strand. In one embodiment, the LoxP sites may be in the same orientation relative to each other on the same DNA strand. Without wishing to be bound by theory, expression of the CRE recombinase will result in inversion or in excision of the region or part of a region which is flanked by the recognition sites. This region may be, but is not limited to, the coding region or any other region of the viral genome.

[0305] In one embodiment, the payload may be irreversibly turned off. In another embodiment, the recombination event may be reversible.

[0306] In one embodiment of the present invention, the payload construct may comprise two or more LoxP sites located in or flanking one or more payload construct regions. These regions include the 5′ITR region, the region downstream of the 5′ITR and upstream of the promoter, the promoter region, the 5′UTR region, the coding region, the 3′UTR region, the region downstream of the 3′UTR and upstream of the 3′ITR, and the 3′ITR region.

[0307] In one embodiment, the two or more LoxP sites may flank two or more regions. In one embodiment, the two or more LoxP site may be comprised within one region. In one embodiment, the two or more LoxP sites may be positioned within more than one region. The two or more LoxP sites may be located at any position within any of the regions, i.e., at the 5′ end, and the 3′ end or in the middle of a region. In some aspects, the two or more LoxP sites may flank certain regulatable elements located within a certain region or across one or more regions. In some aspects, the two or more LoxP sites may flank the coding sequence or a part thereof.

[0308] As a non-limiting example, the payload construct may comprise two sites, each of which is located in a different region. In another non-limiting example, the payload construct may comprise two sites and the two LoxP sites may flank one or more regions. In another non liming example, the payload construct may comprise two sites, which are both located in one region. In one embodiment, the payload construct comprises only one recognition site.

[0309] Non-limiting examples of constructs with recombinase recognition sites are described in US20140127162, the contents of which is herein incorporated by reference in its entirety.

[0310] In one embodiment, the payload construct may comprise a synthetic intron flanked on the 5′ end by a splice donor site and on the 3′ end by a splice acceptor site. In one embodiment, the synthetic intron may be located in the promoter. In one embodiment, the synthetic intron within the promoter may comprise an enhancer element. In a non-limiting example, the enhancer element may be a UBC enhancer. In one embodiment, the splice donor sites and the splice acceptor sites may each be flanked on both sides by a recombinase recognition site, including but not limited to LoxP. In one embodiment, all four recombinase recognition sites are in the same orientation. In one embodiment the promoter may be a modified CAS1 promoter, comprising, from 5′ to 3′, a CMV enhancer fragment, beta-actin promoter fragment, a splice donor, a UBC enhancer fragment, a splice acceptor, in which a first pair of LoxP sites flank the splice donor, and a second pair of LoxP site flank the splice acceptor, and in which all four of the LoxP sites are in the same orientation, as described in US Publication No. US20140127162, the contents of which is herein incorporated by reference in its entirety.

[0311] In one embodiment, a recombinase recognition site may be located in the 3′UTR region. The 3′UTR region may comprise one or more posttranscriptional regulatable elements, such as woodchuck hepatitis virus posttranscriptional regulatable elements (WPRE), hepatitis B virus posttranscriptional regulatable elements HBV/PRE, or RNA transport elements (RTE) or variants thereof. The posttranscriptional regulatable element may be flanked on each side by a recombinase recognition site, as described in US Publication No. US20140127162, the contents of which is herein incorporated by reference in its entirety. Alternatively, the posttranscriptional regulatable element, such as a WPRE, may comprise one or more recombinase recognition sites. The 3′UTR may further comprise a polyadenylation site, including but not limited to the SV40 polyadenylation site. The polyadenylation site may be flanked by two recombinase recognition sites or may comprise one or more recognition sites, as described in US Publication No. US20140127162. In one embodiment, the payload construct may comprise a first recombinase recognition site downstream (or 3′) of the first ITR, and upstream (or 5′) of the 3′ end of promoter and a second recombinase recognition site positioned downstream (3′) of the 5′ end of the promoter and a third recombinase recognition site positioned downstream (or 3′) of the payload and upstream (or 5′) of a second ITR. All three of the recombinase sites may be oriented in the same direction. In another embodiment, the payload construct may also include a WPRE in the 3′ UTR and a fourth recombinase recognition site positioned upstream (or 5′) of a 3′ end of the WPRE. In another embodiment, the payload construct may include a fifth recombinase recognition site positioned downstream (or 3′) of a 5′ end of the WPRE. In another embodiment, the payload construct may also include a sixth recombinase recognition site positioned downstream (or 3′) of the WPRE and upstream (or 5′) of the second ITR. In one aspect, all six recombinase target sites may all be oriented in the same direction. In some embodiments the WPRE is a short WPRE as described in US Publication No. US20140127162.

[0312] In some embodiments, the payload construct may comprise recombinase recognition sites in different orientations. In a non-limiting example, two or more of a first recombinase target site are oriented in a first orientation, and two or more of a different, second recombinase recognition site are oriented in a second orientation, such that recombination events cannot be induced between the first and second sites. In some embodiments, two or more of a first recombinase recognition site (e.g., a LoxP site) are oriented in one direction flanking a first sequence, and two or more of a second, different, recombinase recognition site (e.g., an FRT site, the target recognition site for the FLP recombinase) are oriented in the other direction, flanking a second sequence. Without wishing to be bound by theory, CRE would then induce recombination between the LoxP sites to excise the first sequence, while the addition of FLP would induce recombination between the FRT sites to excise the second sequence.

[0313] In one embodiment, the payload construct may comprise any of the regulatory sequences comprised in the vectors described in US Publication No. US20140127162, the contents of which is herein incorporated by reference in its entirety.

[0314] In one embodiment, the payload expression may be induced by a regulatable element comprising a recombinase. In one embodiment, the payload construct may comprise a stop cassette element. The stop cassette element may be located within or in between one or more of the payload construct regions. In one embodiment, the stop cassette element may be constructed of the elements described in US Publication No. US20150020223, the contents of which is herein incorporated by reference in its entirety. In one embodiment, the stop cassette element may be located between the promoter and the coding sequence. In one embodiment, the stop cassette element may be LoxP-SV40 polyA x3-LoxP. Without being bound by theory, the CRE recombinase may excise the stop cassette element and induce transcription of the payload. In one embodiment, a viral genome comprises a promoter which may comprise a stop cassette element. In a non-limiting example, the stop cassette element located in the promoter may be the one described in US Publication No. US20150020223, the contents of which is herein incorporated by reference in its entirety. In one embodiment, the viral genome comprises a promoter which comprises a stop cassette element may drive the expression of a Cas9 and/or single guide RNA (sgRNA).

[0315] In one embodiment, the expression of CRE recombinase may be under control of a constitutive promoter. In one embodiment, the expression of CRE recombinase may be under control of an inducible promoter. Non-limiting examples of inducible systems that may govern the expression of CRE recombinase are described herein. In a non-limiting example, the promoter driving expression of the CRE recombinase may be inducible by a rapamycin inducible system as described herein. In one embodiment, the CRE regulatable element of the invention may comprise a pharmacologically induced transgene ablation system as described in US Publication No. US20130023033, the contents of which is herein incorporated by reference in its entirety. In another embodiment, the CRE recombinase may be under control of a tissue specific promoter.

[0316] In one embodiment, the CRE recombinase may be an inducible fusion protein also containing a ligand binding domain. Non-limiting examples are described in Jaisser at al. (Jaisser, F. Inducible gene expression and gene modification in transgenic mice. J. Am. Soc. Nephrol. 11 (suppl. 1), S95-S100(2000)), the contents of which is herein incorporated by reference in its entirety. In some embodiments, the ligand binding domain may be mutated so as not to be induced by the endogenous ligand. In a non-limiting example, the CRE recombinase may be a CRE recombinase fusion with the estrogen ligand-binding domain, which may be active only upon induction by tamoxifen and not endogenous circulating estrogens, as described in Metzger D, Clifford J, Chiba H, Chambon P: Conditional site-specific recombination in mammalian cells using a ligand-dependent chimeric Cre recombinase. Proc Natl Acad Sci USA92: 6991-6995, 1995, the contents of which is herein incorporated by reference in its entirety.

### FLP/FRT System

[0317] In one embodiment, the regulatable-AAV particle comprises at least one regulatable element that when expressed may comprise a FLP recombinase. The FLP/FRT system is analogous to the CRE/Lox recombination system. The targets of the FLP recombinase are the two FLP recognition target sites (FRT) and the recombination events that can occur are the same as those described above for CRE/Lox.

[0318] In one embodiment of the present invention, the payload construct may comprise two or more FRT sites located within a payload construct region. These regions include, but are not limited to, the 5′ITR region, the region downstream of the 5′ITR and upstream of the promoter, the promoter region, the 5′UTR region, the coding region, the 3′UTR region, the region downstream of the 3′UTR and upstream of the 3′ITR, and the 3′ITR region.

[0319] In one embodiment, the FRT sites may be in opposite orientation to each other on the same DNA strand. In one embodiment, the FRT sites may be in the same orientation on the same DNA strand. Without wishing to be bound by theory, expression of the FLP recombinase may result in inversion or in excision of the region flanked by the FLP sites from the payload construct. In one embodiment, the payload expression may be irreversibly turned off. In another embodiment, the recombination event may be reversible.

[0320] In one embodiment, the two or more FRT sites may flank two or more regions. In one embodiment, the two or more FRT site may be comprised within one region. In one embodiment, the two or more FRT sites may be positioned within more than one region. The two or more FRT sites may be located at any position within any of the regions, i.e., at the 5′ end, and the 3′ end or in the middle of a region. In some aspects, the two or more FRT sites may flank certain regulatable elements located within a certain region or across one or more regions. In some aspects, the two or more FRT sites may flank the payload coding sequence or a part thereof.

[0321] Non-limiting examples of constructs with recombinase recognition sites which can be used with the FLP/FRT system are described above for the CRE/LOXP system. Exemplary constructs are also described in US20140127162 and US20130023033, the contents of each of which are herein incorporated by reference in their entirety.

[0322] In one embodiment, the expression of FLP recombinase may be under control of a constitutive promoter.

[0323] In one embodiment, the expression of FLP recombinase may be under control of an inducible promoter. Non-limiting examples of inducible systems that may govern the expression of FLP recombinase are described herein. In one embodiment, the FLP regulatable element of the invention may comprise a pharmacologically induced transgene ablation system as described in US Publication No. US20130023033, the contents of which is herein incorporated by reference in its entirety.

[0324] In another embodiment, the FLP recombinase may be under control of a tissue specific promoter.

[0325] In one embodiment, the payload expression may be induced by a regulatable element comprising a FLP recombinase. In one embodiment, the payload construct may comprise a stop cassette element positioned within or in between one or more of the payload construct regions. In one embodiment the stop cassette element is located between the promoter and the coding sequence. Similar as described supra for CRE recombinase, FLT recombinase may excise the stop cassette element, including but not limited to the stop cassette element described in US Publication No. US20150020223, the contents of which is herein incorporated by reference in its entirety, and induce transcription. In one embodiment, a viral genome comprises a promoter which may comprise a stop cassette element.

[0326] In one embodiment, the FLP recombinase may comprise a ligand binding domain and may be inducible through a ligand.

### Serine Integrases

[0327] In one embodiment, the regulatable-AAV particle comprises at least one regulatable element that when expressed may comprise a serine integrase, such as, but not limited to, ΦC31. The phiC31 integrase is a sequence-specific recombinase encoded within the genome of the bacteriophage phiC31. The phiC31 integrase mediates recombination between two 34 base pair sequences, one found in the phage and the other in the bacterial host and can function in many cell types including mammalian cells.

[0328] In one embodiment, the payload construct may comprise two or more ΦC31 recognition sequences within one or more payload construct regions. These regions include the 5′ITR region, the region downstream of the 5′ITR and upstream of the promoter, the promoter region, the 5′UTR region, the coding region, the 3′UTR region, the region downstream of the 3′UTR and upstream of the 3′ITR, and the 3′ITR region.

[0329] In one embodiment, the two or more ΦC31 sites may flank two or more regions. In one embodiment, the two or more ΦC31 sites may be comprised within one region. In one embodiment, the two or more ΦC31 sites may be positioned within more than one region. The two or more FRT sites may be located at any position within any of the regions, i.e., at the 5′ end, and the 3′ end or in the middle of a region. In some aspects, the two or more ΦC31 sites may flank certain regulatable elements located within a certain region or across one or more regions. In some aspects, the two or more ΦC31 sites may flank the coding sequence or a part thereof.

[0330] Non-limiting examples of constructs with recombinase recognition sites which can be used with an integrase system such as the ΦC31 system are described above for the CRE/LOXP system. Exemplary constructs are also described in US20140127162 and US20130023033, the contents of each of which is herein incorporated by reference in its entirety.

[0331] In one embodiment, the payload expression will be irreversibly turned off. In another embodiment, the recombination event is reversible.

[0332] In one embodiment, the expression of ΦC31 integrase is under control of a constitutive promoter.

[0333] In one embodiment, the expression of ΦC31 integrase is under control of an inducible promoter. Non-limiting examples of inducible systems that may govern the expression of ΦC31 integrase are described herein. In one embodiment, the integrase regulatable element of the invention may comprise a pharmacologically induced transgene ablation system as described in US Publication No. US20130023033, the contents of which is herein incorporated by reference in its entirety.

[0334] In another embodiment, the integrase may be under control of a tissue specific promoter.

### Zinc Finger Nucleases, TALENs, and Meganucleases

[0335] In one embodiment, the regulatable-AAV particle comprises at least one regulatable element that when expressed may comprise a protein or fusion protein such as, but not limited to, zinc finger nucleases, TALENS, and meganucleases. Zinc finger nucleases are artificial restriction enzymes generated by fusing a zinc finger DNA-binding domain to a DNA-cleavage domain. Zinc finger domains can be engineered to target specific desired DNA sequences and this enables zinc-finger nucleases to target unique sequences.

[0336] Transcription activator-like effector nucleases (TALENs) are artificial restriction enzymes generated by fusing a TAL effector DNA-binding domain to a DNA cleavage domain (FokI cleavage domain). In their natural context, TAL effector proteins are secreted by bacteria and bind promoter sequences in the host plant and activate the expression of plant genes that aid bacterial infection. TAL effector proteins DNA binding domains contain variable numbers of amino acid sequence repeats. There is a simple relationship between the identity of two hypervariable amino acid residues in the DNA and sequential DNA bases in the TAL effector's target site, a circumstance, which has been extensively used to design artificial custom TAL effectors domains capable of recognizing new DNA sequences in other hosts. Novel restriction enzyme and novel transcription factor fusion proteins have been created using the TAL effector DNA binding domain.

[0337] Meganucleases are endodeoxyribonucleases characterized by a large recognition site (double-stranded DNA sequences of 12 to 40 base pairs); for example, I-Scel recognizes a specific asymmetric 18 bp element (TAGGGATAACAGGGTAAT (SEQ ID NO: 570) and creates double strand breaks, as described in US Publication No. US20130023033, the contents of which is herein incorporated by reference in its entirety, and references therein.

[0338] TALENs, zinc finger nucleases and meganucleases are contemplated in the instant invention as regulators of payload expression. In a non-limiting example, the payload construct may comprise at least one recognition sequence for a TALEN, Zinc finger nuclease or meganuclease. Regions in which the recognition sequences may be located include the 5′ITR region, the region downstream of the 5′ITR and upstream of the promoter, the promoter region, the 5′UTR region, the coding region, the 3′UTR region, the region downstream of the 3′UTR and upstream of the 3′ITR, and the 3′ITR region.

[0339] Methods of designing the enzymes and their recognition sites so that they do not recognize other genomic sequences in the cell are well known in the art.

[0340] In one embodiment, the payload construct comprises at least one recognition sequence that may be recognized and cleaved by a zinc finger nuclease, TALEN or meganuclease. In one embodiment, this recognition sequence is specific. In one embodiment, the payload expression will be irreversibly turned off.

[0341] In one embodiment, the expression of zinc finger nuclease, TALEN or meganuclease is under control of a constitutive promoter.

[0342] In one embodiment, the expression of zinc finger nuclease, a TALEN or meganuclease is under control of an inducible promoter. Non-limiting examples of inducible systems that may govern the expression of zinc finger nuclease, TALEN or meganuclease are described supra herein. In one embodiment, the endonuclease regulatable element of the invention may comprise a pharmacologically induced transgene ablation system as described in US Publication No. US20130023033, the contents of which is herein incorporated by reference in its entirety.

[0343] In another embodiment, the TALEN or meganuclease may be under control of a tissue specific promoter.

### CRISPR

[0344] The CRISPR (Clustered Regularly Interspersed Short Palindromic Repeats) system functions as an adaptive immune response defense in the genomes of several bacteria and Archaea.

[0345] In bacteria, CRISPR, along with CRISPR-associated or cas genes, function in association with non-coding RNAs to recognize and destroy foreign DNA and to ensure survival against subsequent invasions by a similar pathogen, whether a virus or plasmid. Three types of CRISPR systems have been identified in bacteria with the Type II system being the most widely explored.

[0346] The Type II natural RNA-guided DNA nuclease system includes the Cas9 nuclease (also known as Csn1 and formerly known as Cas5) and two small RNAs known as “crRNA” or CRISPR RNA and “tracrRNA” or trans-activating CRISPR RNA. Both are processed from the clustered repeats encoded in the bacterial host genome. The type II CRISPR system requires both the crRNA and the tracrRNA to be functional. In this system, the crRNA associates with the cas9 endonuclease and acts as a hybridization strand providing localization to the complementary target DNA while the tracrRNA associates with the crRNA through partial hybridization and has been shown to be necessary for Cas9 complex binding to the target dsDNA. Once associated with the target dsDNA site, the cas9 enzyme cleaves both strands of the dsDNA thereby destroying the invading organism.

[0347] The Type II system is exemplified by the systems found in Streptococcus pyogens and Streptococcus thermophilus. Here the effector complex involves a single Cas9 protein. Early studies of CRISPR-dependent immunity in Streptococcus thermophilus were performed by Barrangou and colleagues (Barrangou et al., Science; 2007; 315:1709-12; Horvath and Barrangou, Science, 2010; 327:167-170). In the S. thermophilus strain, the tracrRNA of approximately 65 nucleotides co-purifies with the Cas9 protein and a 42 nucleotide crRNA (Karvelis et al., RNA Biology, 2013; 10:5: 841-851). Sapranauskas et al. demonstrated the transfer of the S. thermophilus CRISPR3/Cas system into E. coli and that this transfer could provide protection against plasmid transformation. It was also shown that the protection was sequence specific (NAR, 2011; 39(21): 9275-9282).

[0348] Studies of the maturation process of the crRNA and tracrRNA in S. pyogens illustrated the necessity of the tracrRNA for maturation of the functional complex and the involvement of an RNase III (Deltcheva, et al., Nature, 2011; 471:602-607). The work of Deltcheva et al. led to the work of Jinek, et al. (Science, 2012; 337:816-821) showing that the crRNA and tracrRNA could be combined into one chimeric RNA molecule to produce a functional ribonucleoprotein complex which could cleave a plasmid or oligonucleotide duplex bearing the required protospacer and PAM. Jinek et al. showed that each Cas9 domain cleaved only one strand of the dsDNA duplex and that point mutations in conserved catalytic amino acids of the two domains (D10A and H840A) resulted in the determination that the HNH domain (mutation H840A) cleaves the strand complementary to the crRNA (or template strand) while the RuvC-like domain (mutation D10A) cleaves the non-complementary or displaced strand (or non-template strand) which comprises the protospacer.

[0349] It has since been discovered that Type II CRISPR nuclease-guided cleavage of dsDNA can be reprogrammed to work in higher organism by providing a Cas9 enzyme and altering the features of the two small RNAs associated with the Cas enzyme. In higher organisms such as in mammalian cells, targeting and cleavage of the endogenous or genomic dsDNA triggers the cell's natural repair mechanisms through either non-homologous end joining (NHEJ) or homology directed repair (HDR) pathways, thereby editing the target genomic site.

[0350] This observation inspired a series of studies exploring the requirements of tracrRNA size, DNA binding and hybridization, mutant Cas9 enzymes, delivery of the enzyme and RNA molecules to mammalian cells, localization to the nucleus, off-target effects, the specificity of genome editing and multiplexing target sites (Karvelis et al., RNA Biology, 2013; 10:5; 841-851; Gasiunas et al., PNAS, USA 2012; 109:E2579-E2586; Cong et al., Science, 2013; 339: 819-823; Mali, et al., Science; 2013;339: 823-826; Hwang et al., Nat. Biotechnol., 2013; doi 10.1038/nbt.2501; Cho et al., Nat. Biotechnol., 2013; doi 10.1038/nbt.2507; Jiang et al., Nat. Biotechnol., 2013; 31; 233-241; Fu et al., Nat. Biotechnol. 2013; doi: 10.1038/nbt2623; and Chylinski et al., RNA Biology; 2013; 10:5; 726-737).

[0351] The use of the CRISPR/Cas9 system in mice has been studied by Shen and Wang et al., (Cell, 2013; 153:910-918). Shen et al. targeted a GFP transgene in the mouse genome by administering a Cas9 mRNA and pre-annealed crRNA-tracrRNA chimera to mouse embryos. They showed site specific cleavage in a chromosomal locus. Wang et al. explored triggering homologous recombination in the mouse and utilized a Cas9 mRNA and chimeric crRNA-tracrRNA. In these studies, conversion of an EcoRV site to an EcoRI restriction sites was successful upon a two base pair insertion. Still neither group demonstrated insertion of a larger polynucleotide.

[0352] Cleavage deficient Cas9 enzymes of Streptococcus pyogens and S. thermophilus have been explored further by Sapranauskas et al., (NAR, 2011; 39(21); 9275-9282), Qi et al., (Cell, 2013; 152:1173-1183) and Bikard et al., (NAR, 2013; 1-9) where the effects on transcription modulation including upregulation and silencing were investigated.

[0353] Studies in organisms other than bacteria include those in yeast (DiCarlo et al., NAR; 2013; 41:4336-4343), Drosophila (Gratz; Yu et al., Genetics, 2013; doi10.1534/genetics.113.153825) and Zebrafish (Hwang et al., Nat. Biotechnol. Doi 10.1038/nbt.2501).

[0354] CRISPR/Cas9 is an RNA-guided DNA endonuclease enzyme and target specificity stems from the guide RNA. Certain CRISPR based methods can be used to control the copies and residence time of a gene product delivered in host human cells.

[0355] In embodiments, the regulatable-AAV particles may comprise one or more CRISPR regulatable elements. Such regulatable-AAV particles may be termed “CRISPR-AAV particles.” As used herein, a “CRISPR regulatable element” includes any component of a CRISPR system including but not limited to a Cas9, Cas9 related nucleases, or Cas9-fusion proteins, one or more sgRNA (small guide RNAs), one or more tracrRNAs and/or other polynucleotide feature or motif which imparts regulatable or tunable features to a viral genome encoding them.

[0356] CRISPR-AAV particles may be designed for gene knockdown or for gene replacement (resulting in e.g., activation, initiation, and increased expression).

[0357] In an embodiment contemplated by the current invention, a CRISPR regulatable element may selectively disrupt fragments of a regulatable-AAV particle. Upon delivery, a CRISPR regulatable element comprising Cas9 and a custom RNA sequence for guidance of Cas9 may cleave the payload construct or viral genome at a strategically placed target site, thereby inactivating the payload.

[0358] In some embodiments, the cas9 protein or nuclease is the CRISPR regulatable element and may be selected from any of the known or putative Streptococcus cas9 enzymes in the Uniprot cluster and listed in Table 4. Such proteins, if they are to be delivered as a nucleic acid such as an encoded mRNA and expressed in an organism other than Streptococcus, may be codon optimized for expression in the recipient cell or organism.

TABLE 4
Cas 9 proteins of Streptococcus sp.

| | | | SEQ |
|---|---|---|---|
| Uniprot | | | ID |
| Entry | Protein name | Organism | NO |
| Q03JI6 | CRISPR-associated endonuclease Cas9 | Streptococcus thermophilus (strain | 571 |
| | 2 (EC 3.1.—.—) | ATCC BAA-491/LMD-9) | |
| Q99ZW2 | CRISPR-associated endonuclease | Streptococcus pyogenes serotype M1 | 572 |
| | Cas9/Csnl (EC 3.1.—.—) | | |
| G3ECR1 | CRISPR-associated endonuclease Cas9 | Streptococcus thermophilus | 573 |
| | (EC 3.1.—.—) | | |
| J3JPT0 | CRISPR-associated protein csn1 | Streptococcus ratti FA-1 = DSM 20564 | 574 |
| | (Uncharacterized protein) | | |
| I5BLK7 | Uncharacterized protein | Streptococcus agalactiae ZQ0910 | 575 |
| K4Q9P5 | Uncharacterized protein | Streptococcus dysgalactiae subsp. | 576 |
| | | equisimilis AC-2713 | |
| Q3D2H4 | Reticulocyte binding protein | Streptococcus agalactiae H36B | 577 |
| M2GS30 | Uncharacterized protein | Streptococcus mutans A19 | 578 |
| Q3DG33 | Reticulocyte binding protein | Streptococcus agalactiae CJB111 | 579 |
| M1YDU0 | Uncharacterized protein | Streptococcus agalactiae LADL-90-503 | 580 |
| M7DS80 | Uncharacterized protein | Streptococcus mutans ATCC 25175 | 581 |
| M7DAQ6 | Uncharacterized protein | Streptococcus mutans KK23 | 582 |
| M2KYB4 | Uncharacterized protein | Streptococcus mutans S1B | 583 |
| I0Q2W2 | CRISPR-associated protein Cas9/Csn1, | Streptococcus oralis SK610 | 584 |
| | subtype II/NMEMI | | |
| Q3DN68 | Reticulocyte binding protein | Streptococcus agalactiae 515 | 585 |
| E9FPR9 | CRISPR-associated protein, Csn1 | Streptococcus sp. M334 | 586 |
| | family | | |
| F5U0T2 | CRISPR-associated protein, Csn1 | Streptococcus anginosus SK52 = DSM | 587 |
| | family | 20563 | |
| H8HE09 | CRISPR-associated protein Csn1 | Streptococcus pyogenes MGAS1882 | 588 |
| M2E8A3 | Uncharacterized protein | Streptococcus mutans 8ID3 | 589 |
| Q3DAP7 | Reticulocyte binding protein | Streptococcus agalactiae COH1 | 590 |
| J7TMY5 | Putative cytosolic protein | Streptococcus salivarius K12 | 591 |
| F2C4I5 | Csn1 family CRISPR-associated protein | Streptococcus sanguinis SK330 | 592 |
| F9HIG7 | CRISPR-associated protein Cas9/Csn1, | Streptococcus sp. oral taxon 056 str. | 593 |
| | subtype II/NMEMI | F0418 | |
| E0PL18 | Csn1 family CRISPR-associated protein | Streptococcus gallolyticus subsp. | 594 |
| | | gallolyticus TX20005 | |
| M4YX12 | CRISPR-associated protein | Streptococcus dysgalactiae subsp. | 595 |
| | | equisimilis RE378 | |
| M1XVB4 | Uncharacterized protein | Streptococcus agalactiae SS1219 | 596 |
| M7E3Z6 | CRISPR-associated protein csn1 | Streptococcus mutans NCTC 11060 | 597 |
| M2ECS5 | Uncharacterized protein | Streptococcus mutans 4SM1 | 598 |
| F0I6Z8 | Csn1 family CRISPR-associated protein | Streptococcus sanguinis SK115 | 599 |
| M2FSD0 | Uncharacterized protein | Streptococcus mutans 2VS1 | 600 |
| J7M7J1 | Uncharacterized protein | Streptococcus pyogenes M1 476 | 601 |
| M2LXP5 | Uncharacterized protein | Streptococcus mutans U2B | 602 |
| M2IJW5 | Uncharacterized protein | Streptococcus mutans M2A | 603 |
| M2KKV5 | Uncharacterized protein | Streptococcus mutans 66-2A | 604 |
| M2IIP5 | Uncharacterized protein | Streptococcus mutans NLML9 | 605 |
| M2DYK8 | Uncharacterized protein | Streptococcus mutans 4VF1 | 606 |
| M2HBR4 | Uncharacterized protein | Streptococcus mutans N66 | 607 |
| G5KAN2 | CRISPR-associated protein Cas9/Csn1, | Streptococcus pseudoporcinus LQ 940- | 608 |
| | subtype II/NMEMI | 04 | |
| M2F746 | Uncharacterized protein | Streptococcus mutans 11VS1 | 609 |
| M2KCP8 | Uncharacterized protein | Streptococcus mutans SA38 | 610 |
| K4N5K1 | CRISPR-associated protein, Csn1 | Streptococcus pyogenes A20 | 611 |
| | family | | |
| M2G9R5 | Uncharacterized protein | Streptococcus mutans A9 | 612 |
| M2KJE3 | Uncharacterized protein | Streptococcus mutans SM4 | 613 |
| M7CZ76 | Uncharacterized protein | Streptococcus mutans KK21 | 614 |
| M2FYT7 | Uncharacterized protein | Streptococcus mutans M21 | 615 |
| F5U4D7 | CRISPR-associated protein, Csn1 | Streptococcus dysgalactiae subsp. | 616 |
| | family (Fragment) | equisimilis SK1249 | |
| F5U5Q4 | Putative uncharacterized protein | Streptococcus dysgalactiae subsp. | 617 |
| | (Fragment) | equisimilis SK1249 | |
| M2H646 | Uncharacterized protein | Streptococcus mutans U138 | 618 |
| M2KHB4 | Uncharacterized protein | Streptococcus mutans SM1 | 619 |
| M2J4V9 | Uncharacterized protein | Streptococcus mutans ST6 | 620 |
| M2F2U6 | Uncharacterized protein | Streptococcus mutans 11SSST2 | 621 |
| G7SP82 | CRISPR-system-like protein | Streptococcus suis ST1 | 622 |
| M2FXA5 | Uncharacterized protein | Streptococcus mutans G123 | 623 |
| M2IJB5 | Uncharacterized protein | Streptococcus mutans NV1996 | 624 |
| M7E6C3 | Uncharacterized protein | Streptococcus mutans AC4446 | 625 |
| K1LK43 | Csn1 family CRISPR-associated protein | Streptococcus iniae 9117 | 626 |
| I0SF74 | CRISPR-associated protein Cas9/Csn1, | Streptococcus constellatus subsp. | 627 |
| | subtype II/NMEMI | constellatus SK53 | |
| M1YIE1 | Uncharacterized protein | Streptococcus agalactiae CF01173 | 628 |
| M2J1X3 | Uncharacterized protein | Streptococcus mutans W6 | 629 |
| I6SW88 | CRISPR-associated protein csn1 | Streptococcus mutans GS-5 | 630 |
| I6Q294 | Csn1 | Streptococcus thermophilus MN-ZLW- | 631 |
| | | 002 | |
| F0FD37 | Csn1 family CRISPR-associated protein | Streptococcus sanguinis SK353 | 632 |
| F9NIK9 | CRISPR-associated protein Cas9/Csn1, | Streptococcus dysgalactiae subsp. | 633 |
| | subtype II/NMEMI | equisimilis SK1250 | |
| F9NIK8 | Putative uncharacterized protein | Streptococcus dysgalactiae subsp. | 634 |
| | | equisimilis SK1250 | |
| M2JCP4 | Uncharacterized protein | Streptococcus mutans B | 635 |
| K4PPI8 | CRISPR-associated protein | Streptococcus agalactiae SA20-06 | 636 |
| E1LI65 | HNH endonuclease family protein | Streptococcus mitis SK321 | 637 |
| E9FJ16 | CRISPR-associated protein, Csn1 | Streptococcus sp. C300 | 638 |
| | family | | |
| M2KGB0 | Uncharacterized protein | Streptococcus mutans 14D | 639 |
| M7DIF2 | CRISPR-associated protein csn1 | Streptococcus mutans 5DC8 | 640 |
| M2INU6 | Uncharacterized protein | Streptococcus mutans SF1 | 641 |
| M2LHR5 | Uncharacterized protein | Streptococcus mutans 24 | 642 |
| J4TM44 | CRISPR-associated protein Cas9/Csn1, | Streptococcus anginosus SK1138 | 643 |
| | subtype II/NMEMI | | |
| M2JLG8 | Uncharacterized protein | Streptococcus mutans SM6 | 644 |
| I7QXF2 | Putative cytoplasmic protein | Streptococcus canis FSL Z3-227 | 645 |
| I3I1V4 | Putative cytoplasmic protein | Streptococcus pyogenes HKU | 646 |
| | | QMH11M0907901 | |
| J8T4Q2 | Uncharacterized protein | Streptococcus agalactiae GB00112 | 647 |
| E7S4M3 | Csn1 family CRISPR-associated protein | Streptococcus agalactiae ATCC 13813 | 648 |
| M2HZK2 | Uncharacterized protein | Streptococcus mutans NLML4 | 649 |
| M2DAT4 | Uncharacterized protein | Streptococcus mutans 1SM1 | 650 |
| M2GPV5 | CRISPR-associated protein | Streptococcus mutans NMT4863 | 651 |
| M5PJI2 | CRISPR-associated protein | Streptococcus parauberis KRS-02109 | 652 |
| F8Y040 | Putative uncharacterized protein | Streptococcus agalactiae FSL S3-026 | 653 |
| M2FXC0 | Uncharacterized protein | Streptococcus mutans 5SM3 | 654 |
| M2ENP9 | Uncharacterized protein | Streptococcus mutans NFSM2 | 655 |
| M1XWD6 | Uncharacterized protein | Streptococcus agalactiae SS1014 | 656 |
| K0U976 | Uncharacterized protein | Streptococcus agalactiae STIR-CD-17 | 657 |
| E0PEL3 | Csn1 family CRISPR-associated protein | Streptococcus bovisATCC 700338 | 658 |
| M2EUD0 | Uncharacterized protein | Streptococcus mutans 3SN1 | 659 |
| E4L3R1 | CRISPR-associated protein, Csn1 | Streptococcus pseudoporcinus SPIN | 660 |
| | family | 20026 | |
| M2LYU7 | Uncharacterized protein | Streptococcus mutans R221 | 661 |
| M2IAS5 | Uncharacterized protein | Streptococcus mutans N3209 | 662 |
| M2KAP8 | Uncharacterized protein | Streptococcus mutans NLML1 | 663 |
| M2F4E1 | Uncharacterized protein | Streptococcus mutans N29 | 664 |
| E8JP81 | Csn1 family CRISPR-associated protein | Streptococcus equinus ATCC 9812 | 665 |
| M2G1L7 | Uncharacterized protein | Streptococcus mutans NVAB | 666 |
| J4K985 | CRISPR-associated protein Cas9/Csn1, | Streptococcus oralis SK304 | 667 |
| | subtype II/NMEMI | | |
| M2E7C1 | CRISPR-associated protein | Streptococcus mutans 15VF2 | 668 |
| Q3DQT5 | CRISPR-associated protein, SAG0894 | Streptococcus agalactiae 18RS21 | 669 |
| | family (Fragment) | | |
| M2IP01 | Uncharacterized protein | Streptococcus mutans SF14 | 670 |
| E6J3R0 | CRISPR-associated protein, Csn1 | Streptococcus anginosus F0211 | 671 |
| | family | | |
| G5JVJ9 | CRISPR-associated protein Cas9/Csn1, | Streptococcus macacae NCTC 11558 | 672 |
| | subtype II/NMEMI | | |
| K8MQ90 | CRISPR-associated protein cas9/csn1, | Streptococcus sp. F0441 | 673 |
| | subtype II/nmemi | | |
| M2KYT3 | Uncharacterized protein | Streptococcus mutans M230 | 674 |
| H8HAK7 | CRISPR-associated protein Csn1 | Streptococcus pyogenes MGAS15252 | 675 |
| M2HZJ5 | Uncharacterized protein | Streptococcus mutans NFSM1 | 676 |
| E4SQY2 | CRISPR-associated endonuclease, Csn1 | Streptococcus thermophilus (strain | 677 |
| | family | ND03) | |
| Q1JC13 | Hypothetical cytosolic protein | Streptococcus pyogenes serotype M12 | 678 |
| | | (strain MGAS2096) | |
| C6SPS8 | Uncharacterized protein | Streptococcus mutans serotype c (strain | 679 |
| | | NN2025) | |
| C5WH61 | CRISPR-associated protein Csn1 | Streptococcus dysgalactiae subsp. | 680 |
| | | equisimilis (strain GGS_124) | |
| Q8E042 | Putative uncharacterized protein | Streptococcus agalactiae serotype V | 681 |
| | | (strain ATCC BAA-611/2603 VZR) | |
| F5WVJ4 | CRISPR-associated protein | Streptococcus gallolyticus (strain ATCC | 682 |
| | | 43143/F-1867) | |
| D3HEH4 | CRISPR-associated protein | Streptococcus gallolyticus (strain | 683 |
| | | UCN34) | |
| J9YP56 | Uncharacterized protein | Streptococcus agalactiae serotype Ia | 684 |
| | | (strain GD201008-001) | |
| Q8E5R9 | Putative uncharacterized protein | Streptococcus agalactiae serotype III | 685 |
| | gbs0911 | (strain NEM316) | |
| F7IUC8 | Putative uncharacterized protein | Streptococcus pyogenes serotype M3 | 686 |
| | SPS1176 | (strain SSI-1) | |
| Q8DTE3 | Putative uncharacterized protein | Streptococcus mutans serotype c (strain | 687 |
| | | ATCC 700610/UA159) | |
| F0VS85 | CRISPR-associated protein | Streptococcus gallolyticus (strain ATCC | 688 |
| | | BAA-2069) | |
| B5XLC1 | Putative uncharacterized protein | Streptococcus pyogenes serotype M49 | 689 |
| | | (strain NZ131) | |
| Q3K1G4 | CRISPR-associated protein, SAG0894 | Streptococcus agalactiae serotype Ia | 690 |
| | family | (strain ATCC 27591/A909/CDC | |
| | | SS700) | |
| E8QAX4 | Hypothetical cytosolic protein | Streptococcus dysgalactiae subsp. | 691 |
| | | equisimilis (strain ATCC 12394/ | |
| | | D166B) | |
| H6PBR9 | CRISPR-associated protein, SAG0894 | Streptococcus infantarius (strain CJ18) | 692 |
| | family | | |
| Q48Z31 | Hypothetical cytosolic protein | Streptococcus pyogenes serotype M1 | 693 |
| Q1J6W2 | Hypothetical cytosolic protein | Streptococcus pyogenes serotype M4 | 694 |
| | | (strain MGAS10750) | |
| Q8K7R2 | Putative uncharacterized protein | Streptococcus pyogenes serotype M3 | 695 |
| | | (strain ATCC BAA-595/MGAS315) | |
| Q1JLZ6 | Hypothetical cytosolic protein | Streptococcus pyogenes serotype M12 | 696 |
| | | (strain MGAS9429) | |
| Q48TU5 | Hypothetical cytosolic protein | Streptococcus pyogenes serotype M28 | 697 |
| | | (strain MGAS6180) | |
| Q1JH43 | Hypothetical cytosolic protein | Streptococcus pyogenes serotype M2 | 698 |
| | | (strain MGAS10270) | |

[0359] Chylinski et al. (RNA Biology, 2013, 10:5, 726-737, the contents of which are herein incorporated by reference in their entirety including supplemental materials), has identified several Cas9 orthologs from Type II CRISPR-Cas loci. Any of these may be used as the CRISPR regulatable element.

[0360] According to the present invention, these Cas9 enzymes may also serve as genome editing enzymes, e.g., CRISPR regulatable elements, of the invention and are given in Table 5. Given in the table are the gi accession numbers from NCBI and the name of the bacterial strain. It will be understood that such enzymes, when expressed in any organism other than the wild type strain may be codon optimized for that organism at the nucleic acid level.

TABLE 5
Cas9 Orthologs

| | | SEQ ID |
|---|---|---|
| gi Number | Strain | NO |
| 491523080 | Veillonella atypica ACS-134-V-Col7a | 699 |
| 492568239 | Fusobacterium nucleatum subsp. vincentii | 700 |
| | ATCC 49256 | |
| 291166249 | Filifactor alocis ATCC 35896 | 701 |
| 320130861 | Solobacterium moorei F0204 | 702 |
| 291520705 | Coprococcus catus GD-7 | 703 |
| 42525843 | Treponema denticola ATCC 35405 | 704 |
| 496176552 | Peptoniphilus duerdenii ATCC BAA-1640 | 705 |
| 493553119 | Catenibacterium mitsuokai DSM 15897 | 706 |
| 24379809 | Streptococcus mutans UA159 | 707 |
| 15675041 | Streptococcus pyogenes SF370 | 708 |
| 499300419 | Listeria innocua Clip11262 | 709 |
| 500000752 | Streptococcus thermophilus LMD-9 | 710 |
| 323463801 | Staphylococcus pseudintermedius | 711 |
| 352684361 | Acidaminococcus intestini RyC-MR95 | 712 |
| 503017123 | Olsenella uli DSM 7084 | 713 |
| 366983953 | Oenococcus kitaharae DSM 17330 | 714 |
| 503128334 | Bifidobacterium bifidum S17 | 715 |
| 504382875 | Lactobacillus rhamnosus GG | 716 |
| 489744644 | Lactobacillus gasseri JV-V03 | 717 |
| 501247123 | Finegoldia magna ATCC 29328 | 718 |
| 47458196 | Mycoplasma mobile 163K | 719 |
| 284931710 | Mycoplasma gallisepticum str. F | 720 |
| 498006766 | Mycoplasma ovipneumoniae SC01 | 721 |
| 384393286 | Mycoplasma canis PG 14 | 722 |
| 144575181 | Mycoplasma synoviae 53 | 723 |
| 238875750 | Eubacterium rectale ATCC 33656 | 724 |
| 500000239 | Streptococcus thermophilus LMD-9 | 725 |
| 315149830 | Enterococcus faecalis TX0012 | 726 |
| 488391463 | Staphylococcus lugdunensis M23590 | 727 |
| 158432258 | Eubacterium dolichum DSM 3991 | 728 |
| 497700222 | Lactobacillus coiyniformis subsp. torquens | 729 |
| | KCTC 3535 | |
| 503154365 | Ilyobacter polytropus DSM 2926 | 730 |
| 488935851 | Ruminococcus albus 8 | 731 |
| 187426541 | Akkermansia muciniphila ATCC BAA-835 | 732 |
| 117649621 | Acidothermus cellulolyticus 11B | 733 |
| 189429199 | Bifidobacterium longum DJO10A | 734 |
| 502666262 | Bifidobacterium dentium Bd1 | 735 |
| 499236428 | Corynebacterium diphtheriae NCTC 13129 | 736 |
| 501382854 | Elusimicrobium minutum Pei191 | 737 |
| 319419610 | Nitratifractor salsuginis DSM 16511 | 738 |
| 324027241 | Sphaerochaeta globus str. Buddy | 739 |
| 502574305 | Fibrobacter succinogenes subsp. succinogenes | 740 |
| | S85 | |
| 496648031 | Bacteroides fragilis NCTC 9343 | 741 |
| 506262077 | Capnocytophaga ochracea DSM 7271 | 742 |
| 499794158 | Rhodopseudomonas palustris BisB18 | 743 |
| 494010777 | Prevotella micans F0438 | 744 |
| 294472455 | Prevotella ruminicola 23 | 745 |
| 503930464 | Flavobacterium columnare ATCC 49512 | 746 |
| 310782306 | Aminomonas paucivorans DSM 12260 | 747 |
| 83591793 | Rhodospirillum rubrum ATCC 11170 | 748 |
| 502812437 | Candidatus Puniceispirillum marinum | 749 |
| | IMCC1322 | |
| 500133006 | Verminephrobacter eiseniae EF01-2 | 750 |
| 344171927 | Ralstonia syzygii R24 | 751 |
| 159042956 | Dinoroseobacter shibae DEL 12 | 752 |
| 288910049 | Azospirillum sp- B510 | 753 |
| 91802344 | Nitrobacter hamburgensis X14 | 754 |
| 146407516 | Brady rhizobium sp- BTAi1 | 755 |
| 499451825 | Wolinella succinogenes DSM 1740 | 756 |
| 218563121 | Campylobacter jejuni subsp. jejuni NCTC 11168 | 757 |
| 502787413 | Helicobacter mustelae 12198 | 758 |
| 447027826 | Bacillus cereus Rock1-15 | 759 |
| 501844634 | Acidovorax ebreus TPSY | 760 |
| 189485225 | uncultured Termite group 1 bacterium phylotype | 761 |
| | RsD17 | |
| 489569047 | Clostridium perfringens D str. JGS1721 | 762 |
| 506406750 | Clostridium cellulolyticum H10 | 763 |
| 154154505 | Parvibaculum lavamentivorans DS-1 | 764 |
| 493910016 | Roseburia intestinalis L1-82 | 765 |
| 488163954 | Neisseria meningitidis Z2491 | 766 |
| 499209493 | Pasteurella multocida subsp. | 767 |
| | multocida str. Pm70 | |
| 491573077 | Sutterella wadsworthensis 3 1 45B | 768 |
| 495559660 | gamma proteobacterium HTCC5015 | 769 |
| 499526152 | Legionella pneumophila str. Paris | 770 |
| 496140336 | Parasutterella excrementiho minis YIT 11859 | 771 |
| 499451967 | Wolinella succinogenes DSM 1740 | 772 |
| 489129153 | Francisella novicida U112 | 773 |

[0361] Any of the enzymes or proteins of Tables 4 or 5 may be a CRISPR regulatable element. Several protospacer adjacent motifs (PAMs) have been identified in the art (Westra et al., Annu Rev. Genet. 2012, 46: 311-39; the contents of which are incorporated herein by reference in their entirety). Such PAMs may be used to inform the selection of and/or design of the nucleic acid compositions, e.g., CRISPR-AAV particles, of the present invention. It is also contemplated that utilization of certain Type III enzymes such as those from Staphylococcus epidermidis, Pyrococcus furiosus or S. solfatarcicus will not require the presence of a PAM sequence. PAMs useful in the present invention are given in Table 6. In the table the PAM either follows or precedes the protospacer (that region of the DNA found immediately upstream or downstream of the PAM and on the opposite DNA strand that hybridizes with the sgRNA).

TABLE 6
PAM sequences

| PAM | SEQ ID NO |
|---|---|
| Protospacer-NGG | 774-777 |
| Protospacer-GAA | 778-779 |
| Protospacer-CTT | 780-781 |
| Protospacer-CAT | 782 |
| Protospacer-CCT | 783 |
| Protospacer-CTC | 784 |
| Protospacer-GG | 785-786 |
| WTTCTNN-Protospacer | 787 |
| TTTYRNNN-Protospacer | 788 |
| CNCCN-Protospacer | 789 |
| CCN-Protospacer | 790-791 |

[0362] Recently several improvements have been made to the CRISPR system, which address the more limited AAV packaging size. Recent work with minimal promoter and polyadenylation sequences has produced functional SpCas9 constructs that can be effectively packaged in AAVs, as described in Swiech et al., (In vivo interrogation of gene function in the mammalian brain using CRISPR-Cas9; Nat Biotechnol. 2015 January; 33(1):102-6) and Senis et al. (CRISPR/Cas9-mediated genome engineering: an adeno-associated viral (AAV) vector toolbox; Biotechnol J. 2014 November; 9(11):1402-12), the contents of each of which is herein incorporated by reference in its entirety. In addition, Ran et al., characterized six smaller Cas9 orthologues, including Cas9 from Staphylococcus aureus, which they packed with a guide RNA into a single AAV vector to target PCSK9 in the liver, as described in Ran et al., In vivo genome editing using Staphylococcus aureus Cas9, Nature. 2015 Apr. 9; 520(7546):186-91, the contents of which is herein incorporated by reference in its entirety. Other smaller Cas enzymes have also been described by Cong L et al. (Multiplex genome engineering using CRISPR/Cas systems; Science 339, 819-823, 2013) and Nishimasu et al. (Crystal structure of Cas9 in complex with guide RNA and target DNA; Cell 156, 935-949, 2014), the contents of each of which is herein incorporated by reference in its entirety.

[0363] Fine et al., describe a split-intein Cas9, which can be separated into two AAV cassettes, each less than 4 kb, providing room for regulatory sequences and additional gRNAs in each cassette (Sci Rep. 2015; 5: 10777; Trans-spliced Cas9 allows cleavage of HBB and CCRS genes in human cells using compact expression cassettes), the contents of which is herein incorporated by reference in its entirety. Fusion of effector domains which can be added to the cassette without space constraints include dCas9, FokI, VP64, and KRAB.

[0364] In one embodiment, the regulatable-AAV particle of the present invention may be an AAV-split-Cas9 system as described in Chew et al (A multifunctional AAV-CRISPR-Cas9 and its host response; Nature Methods; published online Sep. 5, 2016), the contents of which are herein incorporated by reference in their entirety. In this split-Cas9 system, SpCas9 is split at its disordered linker (V713-D718), which allows reconstitution of full length Cas9 in vivo by split intein protein trans-splicing. The N-terminal lob of Cas9 is fused to the Rhodothermus marinus N-split intein, while the C-terminal lobe is fused with C-split intein, together shortening the coding sequences below those of other known Cas9 orthologs. In some embodiments the split-Cas9 system may incorporate transcription-activator fusion domains, allowing for targeted upregulation of gene expression. Further, nuclease-active Cas9 combined with truncated gRNAs can bind genomic loci and generate gene activation rather than DNA breaks, thereby allowing a single Cas-9 activator fusion protein to function in gene editing or gene activation processes, depending on the gRNAs and spacer lengths.

[0365] Yang et al., describe administering two AAVs, one expressing Cas9 and the other one expressing a guide RNA and the donor DNA (Nature Biotechnology, 2016, A dual AAV system enables the Cas9-mediated correction of a metabolic liver disease in newborn mice; the contents of which are herein incorporated by reference in its entirety). The Cas9 may be a Cas9 enzyme from Staphylococcus aureus (SaCas9) and the AAV may comprise a TBG promoter. The second AAV may comprise a U6 promoter, a single guide RNA (sgRNA) sequence and a donor DNA.

[0366] Yin et al., describe combining lipid nanoparticle-mediated delivery of Cas9 mRNA with AAV encoding a sgRNA and a repair template to induce repair of a disease gene in animals (Nature Biotechnology, 2016, Therapeutic genome editing by combined viral and non-viral delivery of CRISPR system components in vivo; the contents of which are herein incorporated by reference in its entirety). Additionally the Cas9 may be the smaller form version of Cas9 (Staphylococcus aureus Cas9).

[0367] It is contemplated that of the constructs and enzymes described in Swiech et al, Senis et al., Ran et al., Cong et al., Nishimasu et al., or Fine et al. or any other CRISPR systems optimized for smaller packaging size, may be used as part of the instant invention as CRISPR regulatable elements and/or CRISPR-AAV particles.

[0368] In one embodiment, the expression of the payload may be regulated by a CRISPR Cas9 enzyme and a guide RNA that targets the enzyme to a site within the payload. In some embodiments, the regulatable element may comprise two or more guide RNAs. In some embodiments, the two or more guide RNAs may be specific for two or more different sequences within one or more viral genomes.

[0369] In one embodiment, the CRISPR regulatable element may be a “self-destructing message,” i.e. as Cas9 mRNA is transcribed and then translated, the protein Cas9 together with the sgRNA may bind and create a double strand break in the same delivery vehicle, effectively disrupting its function and destroying the delivery vehicle. An exemplary “self-destructing message is described in Moore et al., Nucl. Acids Res., 2014, the contents of which is herein incorporated in its entirety.

[0370] In one embodiment, the regulatable element of the present invention, when expressed, may be a CRISPR effector protein as described in United States Publication No. US 20160208243, the contents of which are herein incorporated by reference in their entirety. In one embodiment, the CRISPR effector protein is a Cpf1 effector protein, comprising a C-terminal RuvC domain, an N-terminal alpha-helical region and a mixed alpha and beta region located between the RuvC and alpha-helical domains. In these cases, the CRISPR arrays are processed into mature crRNAs without the need of a tracrRNA, wherein the crRNAs comprise a spacer sequence and a direct repeat sequence. A Cpf1p-crRNA complex is alone sufficient to cleave target DNA. In one embodiment, the CRISPR effector protein is a C2c1 loci effector protein. In some embodiments the CRISPR effector protein may have mutations or modifications therein. Further the Cpf1 CRISPR-Cas system may be a split-Cpf1, an inducible system, a self-inactivating system, or a multiplex-tandem targeting approach system. The Cpf1 CRISPR effector proteins described herein may be delivered to plants, animals, stem cells or the like and may be used to treat diseases or disorders.

[0371] In one embodiment, the payload expression may be regulated through the stability of the guide RNA. In one embodiment, the guide RNA may be stabilized through stabilizing elements known in the art. For example, extending the 5′ end of the gRNA may increase the half-life of the gRNA (Mali P, et al. CAS9 transcriptional activators for target specificity screening and paired nickases for cooperative genome engineering. Nat Biotechnol. 2013; 31:833-838). In another embodiment, the guide RNA may be destabilized through destabilizing sequences including those described herein.

[0372] In one embodiment, the expression of Cas9 and the guide RNA may be under control of one promoter. In another embodiment, the expression of Cas9 and the guide RNA may be under control of separate promoters. In one embodiment, Cas9 and the guide RNA expression may both be driven by the same or two different constitutive promoter(s). In one embodiment, the Cas9 and the guide RNA expression may both be driven by the same or two different inducible promoter(s). In another embodiment, the expression of one of the components may be driven by a constitutive promoter, and the other by an inducible promoter. In another embodiment, the viral genome comprises a promoter which can drive tissue specific expression, such that the CRISPR regulatable element is only expressed in certain tissues.

[0373] In one embodiment, the VP2 capsid may comprise a DNA binding domain for the cas9 promoter and/or a transactivating factor for cas9. The transactivating factor may be pre-engineered to induce cas9 expression.

[0374] In one embodiment, the expression of cas9 with a VP2 capsid comprising a DNA binding domain for the cas9 promoter and/or a transactivating factor for cas9 may be consistent over a period of time. The expression may be consistent for minutes (e.g., 1, 2, 3, 4, 5, 6, 7, 8, 9, 10, 15, 20, 25, 30, 35, 40, 45, 50, 55, or more than 55 minutes), hours (e.g., 1, 2, 3, 4, 5, 6, 7, 8, 9, 10, 11, 12, 13, 14, 15, 16, 17, 18, 19, 20, 21, 22, 23 or more than 24 hours), days (e.g., 1, 2, 3, 4, 5, 6, 7, 8, 9, 10, 11, 12, 13, 14, 15, 16, 17, 18, 19, 20 or more than 20 days), weeks (e.g., 1, 2, 3, 4, 5, 6, 7, 8, 9, 10 or more than 10 weeks), or months (e.g., 1, 2, 3, 4, 5, 6, 7, 8, 9, 10, 11, or more than 11 months). As another non-limiting example, expression of cas9 may be a burst of expression for a predetermined period of time (e.g., burst of expression for one hours, two hours, three hours, four hours, five hours, six hours or greater than six hours after administration).

[0375] In one embodiment, the promoter and/or transactivating domain for cas9 may be located within the first 1%, 2%, 3%, 4%, 5%, 6%, 7%, 8%, 9%, 10%, 15%, 20%, 25%, 30%, 35%, 40%, 45%, 46%, 47%, 48,% or 49% of the VP2 capsid. In another embodiment, the promoter and/or transactivating domain for cas9 may be located within the last 1%, 2%, 3%, 4%, 5%, 6%, 7%, 8%, 9%, 10%, 15%, 20%, 25%, 30%, 35%, 40%, 45%, 46%, 47%, 48,% or 49% of the VP2 capsid. In another embodiment, the promoter and/or transactivating factor for cas9 may be located in the middle of the VP2 capsid. In another embodiment, the promoter and/or transactivating domain for cas9 may be located near the beginning of the VP2 capsid. In another embodiment, the promoter and/or transactivating domain for cas9 may be located near the end of the VP2 capsid.

[0376] In some embodiments, the CRISPR regulatable element may encode Cpf1. Cpf1, a class II CRISPR endonuclease, is a single RNA-guided endonuclease lacking tracrRNA, which utilizes a T-rich protospacer-adjacent motif. Cpf1 cleaves DNA via a staggered DNA double-stranded break. Cpf1 is smaller than the standard Cas9, facilitating delivery to desired tissues, as described in Zetsche et al. (Cpf1 Is a Single RNA-Guided Endonuclease of a Class 2 CRISPR-Cas System, Cell, published online Sep. 25, 2015), the contents of which is herein incorporated by reference in its entirety.

[0377] In one embodiment, the expression of Cpf1 and the guide RNA may be under control of one promoter. In another embodiment, the expression of Cpf1 and the guide RNA may be under control of separate promoters. In one embodiment, Cpf1 and the guide RNA expression may both be driven by the same or two different constitutive promoter(s). In one embodiment, the Cpf1 and the guide RNA expression may both be driven by the same or two different inducible promoter(s). In another embodiment, the expression of one of the components may be driven by a constitutive promoter, and the other by an inducible promoter. In another embodiment, the viral genome comprises a promoter which can drive tissue specific expression, such that the CRISPR regulatable element is only expressed in certain tissues.

[0378] In one embodiment, the VP2 capsid may comprise a DNA binding domain for the Cpf1 promoter and/or a transactivating factor for Cpf1. The transactivating factor may be pre-engineered to induce Cpf1 expression.

[0379] In one embodiment, the expression of Cpf1 with a VP2 capsid comprising a DNA binding domain for the Cpf1 promoter and/or a transactivating factor for Cpf1 may be consistent over a period of time. The expression may be consistent for minutes (e.g., 1, 2, 3, 4, 5, 6, 7, 8, 9, 10, 15, 20, 25, 30, 35, 40, 45, 50, 55, or more than 55 minutes), hours (e.g., 1, 2, 3, 4, 5, 6, 7, 8, 9, 10, 11, 12, 13, 14, 15, 16, 17, 18, 19, 20, 21, 22, 23 or more than 24 hours), days (e.g., 1, 2, 3, 4, 5, 6, 7, 8, 9, 10, 11, 12, 13, 14, 15, 16, 17, 18, 19, 20 or more than 20 days), weeks (e.g., 1, 2, 3, 4, 5, 6, 7, 8, 9, 10 or more than 10 weeks), or months (e.g., 1, 2, 3, 4, 5, 6, 7, 8, 9, 10, 11, or more than 11 months). As another non-limiting example, expression of Cpf1 may be a burst of expression for a predetermined period of time (e.g., burst of expression for one hours, two hours, three hours, four hours, five hours, six hours or greater than six hours after administration).

[0380] In one embodiment, the promoter and/or transactivating domain for Cpf1 may be located within the first 1%, 2%, 3%, 4%, 5%, 6%, 7%, 8%, 9%, 10%, 15%, 20%, 25%, 30%, 35%, 40%, 45%, 46%, 47%, 48,% or 49% of the VP2 capsid. In another embodiment, the promoter and/or transactivating domain for Cpf1 may be located within the last 1%, 2%, 3%, 4%, 5%, 6%, 7%, 8%, 9%, 10%, 15%, 20%, 25%, 30%, 35%, 40%, 45%, 46%, 47%, 48,% or 49% of the VP2 capsid. In another embodiment, the promoter and/or transactivating factor for Cpf1 may be located in the middle of the VP2 capsid. In another embodiment, the promoter and/or transactivating domain for Cpf1 may be located near the beginning of the VP2 capsid. In another embodiment, the promoter and/or transactivating domain for Cpf1 may be located near the end of the VP2 capsid.

[0381] In one embodiment, the payload comprises one or more CRISPR recognition sequences. As used herein, the term “CRISPR recognition sequence” refers to a sequence in a construct that the CRISPR system can recognize and can target for regulation of that construct. In one embodiment, the one or more CRISPR recognition sequence is within the coding region. In one embodiment, the CRISPR recognition sequence is outside of the coding region. These regions in which the CRISPR recognition sequence may be located include, but are not limited to, the 5′ITR region, the region downstream of the 5′ITR and upstream of the promoter, the promoter region, the 5′UTR region, the coding region, the 3′UTR region, the region downstream of the 3′UTR and upstream of the 3′ITR, and the 3′ITR region.

[0382] In one embodiment, the guide RNAs, which may be encoded within or used in combination with the regulatable-AAV particles of the present invention, target specific nucleotide sequences of the DMD gene, and can be used for the treatment of Duchenne muscular dystrophy or Becker muscular dystrophy as described in International Publication No. WO2016161380, the contents of which are herein incorporated by reference in their entirety. This genome editing system comprises a first and second gRNA each targeting a domain of 19-24 nucleotides in length of the DMD gene, and at least one Cas9 molecule that recognizes a PAM of either NNGRRT or NNGRRV. This genome editing system results in a first and second double strand break in the first and second intron flanking exon 51 of the DMD gene, thereby causing its deletion. In one embodiment, the gRNA may have a targeting domain that comprises a nucleotide sequence as set forth by any of SEQ ID NOs: 206-826366 as described in WO2016161380.

[0383] In one embodiment, the CRISPR regulatable elements may be located on the same viral genome as the payload. In another embodiment, the CRISPR regulatable elements and payload are on a separate viral genomes and packaged in separate AAV particles.

### Other Cas9 Fusion Proteins

[0384] In one embodiment, the CRISPR/Cas9 system can be reengineered for transcriptional regulation and used with or encapsulated by the viral particles described herein (e.g., AAV particles or CRISPR-AAV particles). Cas9 catalyzes DNA double-stranded breaks via RuvC and HNH endonuclease domains, each of which cleaves one strand of the target DNA. Both of these enzymatic domains can be inactivated by a single amino acid substitution (D10A and H840A), generating a Cas9 protein that has no endonuclease activity but maintains its RNA-guided DNA-binding capacity, as described in Kabadi and Gersbach, Engineering Synthetic TALE and CRISPR/Cas9 Transcription Factors for Regulating Gene Expression, Methods. 2014 Sep; 69(2): 188-197 and references therein, the contents of which is herein incorporated by reference in its entirety. This deactivated Cas9 (dCas9), in conjunction with the gRNA, can function as a modular DNA-binding scaffold. Both activators and repressors have been generated using dCas9, in which the dCas9 is fused to transactivation domains or repressor domains known in the art. Non-limiting examples of these activators and repressors are described in WIPO Patent Publication No. WO2014197748, the contents of which is herein incorporated by reference in its entirety.

[0385] In one embodiment, the CRISPR regulatable element may comprise dCas9 fusion protein further comprising a transactivation or repression domain. In one embodiment, the CRISPR regulatable element may further comprise a guide RNA. In one embodiment, the regulatable element may comprise a dCas9 fusion protein as described in International Publication No. WO2014197748, the contents of which is herein incorporated by reference in its entirety. In some embodiments, the CRISPR regulatable element may comprise a dCas9 fusion protein which is fused to the Krtippel-associated box (KRAB) repressor. In some embodiments, the CRISPR regulatable element may comprise a dCas9 fusion protein which is fused to a transactivation domain selected from VP16, VP64, and NFkappaB p65 transactivation domains or the omega subunit of RNA polymerase.

[0386] In one embodiment, the CRISPR regulatable element may comprise a Cas9 fusion protein described in WIPO Patent Publication WO2014089290, the contents of which is herein incorporated by reference in its entirety. In one embodiment, the CRISPR regulatable element may comprise a Cas9 fusion protein described in International Publication No. WO2015070083, the contents of which is herein incorporated in its entirety. In one embodiment, the Cas9 protein may be enzymatically active, or enzymatically inactive, and is operably linked or fused to the payload, as described in WIPO Patent Publication WO2015070083.

[0387] In one embodiment, the regulatable-AAV particles of the present invention comprise a system of a Cas9 heterodimer, and a Cas9 guide RNA and/or a dimerizing agent, as described in International Publication WO2016114972, the contents of which are herein incorporated by reference in their entirety. In one embodiment, the Cas9 heterodimer comprises a first and a second fusion polypeptide. The first polypeptide comprises a RuvCI polypeptide, a RuvCII polypeptide, an HNH polypeptide, a RuvCIII polypeptide, a PAM-interacting polypeptide and a first fusion partner that is the first member of a dimerization pair. The second polypeptide of the Cas9 heterodimer comprises an alpha-helical recognition region and a second fusion partner that is the second member of the dimerization pair. In some embodiments, the first or second fusion protein may also comprise a nuclear localization signal (NLS). The Cas9 heterodimer may have a sequence having at least 75% sequence identity to SEQ ID NOs: 1-259; 795-1346; or 1545 of International Publication WO2016114972, the contents of which are herein incorporated by reference in their entirety. In some embodiments, the Cas9 heterodimer is used with a guide RNA that comprises stem loop 1, but does not include stem loop 2 and/or stem loop 3.

[0388] In one embodiment, the CRISPR/Cas9 system used with or encapsulated by the viral particles described herein (e.g., AAV particles or CRISPR-AAV particles) is a light inducible CRISPR system. Light inducible CRISPR systems have also been engineered, by fusing the light-inducible heterodimerizing proteins CRY2 and CIB1 from Arabidopsis thaliana to the VP64 transactivation domain at either the N- or C- terminus of dCas9, respectively, as described in Polstein and Gersbach, A light-inducible CRISPR/Cas9 system for control of endogenous gene activation, the contents of which is herein incorporated by reference in its entirety. In one embodiment, the regulatable element of the current invention comprises a dCas9 fusion protein and a transactivating fusion protein, both comprising a light inducible dimerization domain. Any of the light inducible domains described in Jinek et al., A programmable dual-RNA-guided DNA endonuclease in adaptive bacterial immunity, 2012 Aug. 17; 337(6096):816-21, or supra herein, may be used.

[0389] In one embodiment, any Cas9 or Cas9 orthologs may be fused to a destabilizing domain and used with or encapsulated by the viral particles described herein (e.g., AAV particles or CRISPR-AAV particles). Non-limiting examples of destabilizing domains include FK506 Binding Protein (FKBP), E. coli dihydrofolate reductase (DHFR), mouse ornithine decarboxylase (MODC), and estrogen receptors (ER).

[0390] In one embodiment, the regulatable-AAV particle of the present invention may comprise a CRISPR/Cas9 system that is inducible with doxycycline, as described by de Solis et al (The development of a viral mediated CRISPR/Cas9 system with doxycycline dependent gRNA expression for inducible in vitro and in vivo genome editing; Frontiers Molecular Neuroscience; August 2016; 9:70), the contents of which are herein incorporated by reference in their entirety. In this two-vector system, the viral genome of the first AAV particle comprises an H1/TO or U6/TO promoter for expression of the gRNA as well as a Tet repressor element to regulate the expression of the gRNA in a doxycycline dependent manner and the second AAV particle delivers the Cas9. In another embodiment, it is the Cas9 expression that is regulatable by doxycycline, through the use of a truncated second generation tetracycline response element promoter. In the presence of doxycycline, either the gRNAs or the Cas9 are expressed and gene editing or regulatable expression may occur.

### Suicide Regulatable Elements

[0391] In one embodiment, the regulatable element comprises a suicide mechanism.

[0392] Several inducible suicide mechanisms are known in the art. One of the best characterized suicide systems is the herpes virus thymidine kinase/ganciclovir system. HSV/Tk phosphorylates the prodrug ganciclovir, which is then further converted by endogenous kinases into its triphosphate form. During replication, DNA polymerases then incorporate ganciclovir-triphosphate into DNA, causing polymerase inhibition and induction of apoptosis, and cell death.

[0393] Other inducible suicide systems involve inducible Caspase 9, and enzyme which functions as an executioner in the apoptotic pathway. For example, an inducible Caspase 9 system, iCasp9, was described by Di Stasi, et al. (2011) - Inducible apoptosis as a safety switch for adoptive cell therapy. N Engl J Med 365: 1673-1683. iCasp9 is composed of two inactive parts, fused to the FK506-binding protein FKBP12. Dimerization of the parts is induced by addition of the dimerizing ligand AP1903. Other examples of suicide genes include caspase-8 or cytosine deaminase.

[0394] In one embodiment, payload expression is turned off through a suicide mechanism. In one embodiment, the suicide mechanism comprises a regulatable element comprising herpes virus thymidine kinase. In one embodiment, the regulatable element when expressed comprises iCasp9.

[0395] In some embodiments, Caspase-9 may be activated using a specific chemical inducer of dimerization (CID) AP20187. In some embodiments, the regulatable element comprises the inducible Caspase-9 described in US Publication No. US20130071414, the contents of which is herein incorporated by reference in its entirety.

### Regulatable Elements: Protein Stability

[0396] In some embodiments, the payload expression may be regulated by fusion of a stabilizing or a destabilizing domain. Stabilizing and destabilizing domains which can be used are well known in the art. Non-limiting examples of destabilizing domains include FK506 Binding Protein (FKBP), E. coli dihydrofolate reductase (DHFR), mouse ornithine decarboxylase (MODC), or estrogen receptors (ER). In one embodiment, the destabilizing domain may be from an estrogen receptor.

[0397] In some embodiments the destabilizing domain may be inducible. In some embodiments the destabilizing domain may be a “single ligand-single domain,” which allows control of protein stability through a small molecule ligand. In some embodiments the destabilizing domain may be FK506-and rapamycin-binding protein (FKBP12) destabilizing domain, which can be regulated by rapamycin and its analogs, and is unstable in the absence of its ligand. In one embodiment, a point mutant (L106P) of the 107-amino acid protein FKBP confers instability to fusion partners, and this instability is reversed by a synthetic ligand named Shield-1, as described in Banaszynski, L., Chen, L., Maynard-Smith, L. A., Ooi, G. L. and Wandless, T. J. A rapid, reversible, and tunable method to regulate protein function in living cells using synthetic small molecules. Cell 126, 995-1004 (2006), the contents of which is herein incorporated by reference in its entirety.

[0398] In another embodiment, the destabilizing domain may be derived from E. coli dihydrofolate reductase. In some embodiments the small molecule trimethoprim (TMP) can bind to the domain and act as a stabilizer, for example, as described in Iwamoto et al. (Chem Biol. 2010 Sep. 24; 17(9):981-8. A general chemical method to regulate protein stability in the mammalian central nervous system) the contents of which is herein incorporated by reference in its entirety. This system has been shown to be applied to regulation of glia cell derived neurotrophic factor (GDNF), as described in Tai et al. (DOI: 10.1371/journal.pone.0046269, Destabilizing Domains Mediate Reversible Transgene Expression in the Brain), the contents of which is herein incorporated by reference in its entirety.

[0399] In another embodiment, the destabilizing domain may be a light sensitive degradation domain. In a non-limiting example, the light sensitive degradation domain may be one of the domains described in U.S. Pat. No. 9,115,184, the contents of which is herein incorporated by reference in its entirety. In one embodiment, the domain comprises LOV24.

[0400] It is contemplated as part of the invention that any of the destabilizing domains may be combined with any of the enzymes, proteins and fusion proteins described herein.

[0401] In one embodiment, a CRISPR/Cas9 or ortholog may be fused to a destabilizing domain. In one embodiment, a CRISPR/Cas9 or ortholog may be fused to a destabilizing domain which can be further regulated by a ligand.

[0402] In one embodiment, CRE recombinase may be fused to a destabilizing domain. In one embodiment, the CRE recombinase may be fused to a destabilizing domain which can be further regulated by a ligand.

[0403] In one embodiment, FLP recombinase may be fused to a destabilizing domain. In one embodiment, the FLP recombinase may be fused to a destabilizing domain which can be further regulated by a ligand.

[0404] In one embodiment, a meganuclease may be fused to a destabilizing domain. In one embodiment, the meganuclease may be fused to a destabilizing domain which can be further regulated by a ligand.

[0405] In one embodiment, a serine integrase may be fused to a destabilizing domain. In one embodiment, the serine integrase may fused to a destabilizing domain which can be further regulated by a ligand.

[0406] In one embodiment, a zinc finger nuclease may be fused to a destabilizing domain. In one embodiment, the zinc finger nuclease may be fused to a destabilizing domain which can be further regulated by a ligand.

[0407] In one embodiment a fusion protein comprising a TAL effector domain may be fused to a destabilizing domain. In one embodiment, the fusion protein comprising a TAL effector domain may be fused to a destabilizing domain which can be further regulated by a ligand.

[0408] In one embodiment, one or more fusion proteins described herein comprising DNA binding domains and/or transactivation domains may further comprise a destabilizing domain. In one embodiment, tetracycline transactivator protein may further comprise a destabilizing domain. In another embodiment, a hormone responsive protein or fusion protein may further comprise a destabilizing domain. In one embodiment, an ecdysone inducible fusion protein further comprises a destabilizing domain. In one embodiment, one or more fusion proteins within a rapamycin inducible system may further comprise a destabilizing domain.

### Regulatable Element: RNA Transcripts

[0409] Various polynucleotide based methods are also contemplated as useful for regulation of payload expression in certain aspects of the instant invention.

[0410] In one embodiment, the regulatable element comprises a polynucleotide which may bind to the transcript encoded by the payload construct.

[0411] In one embodiment, the regulatable element comprises one or more interfering RNA sequences. In one embodiment, the regulatable element comprising the one or more interfering RNA sequences functions to temporarily turn off or reduce expression of the payload. In one embodiment, the regulatable element comprising the one or more interfering RNA sequences functions to permanently reduce or turn off expression of the payload. In one embodiment, the regulatable element comprises one or more siRNA sequences. In one embodiment, the regulatable element comprises one or more shRNA sequences. In one embodiment, the regulatable element comprises one or more microRNA sequences. In one embodiment, the payload construct may comprise a microRNA binding site or an siRNA binding site. MicroRNA binding sites may be inserted in the 5′ UTR or the 3′UTR of the payload, or within the coding sequence of the payload. siRNA or shRNA binding sites may be inserted in the 5′UTR or the 3′UTR of the payload or within the payload coding sequence. The payload construct may comprise at least one or more binding sites for a miRNA, siRNA or shRNA. These one or more binding sites may be target sites for the same or for various different microRNAs, siRNAs or shRNAs.

[0412] In one embodiment, the payload expression may be regulated by an antisense oligonucleotide. In one embodiment, the regulatable element comprises an antisense oligonucleotide.

[0413] In one embodiment, the regulatable element may comprise a ribozyme. In one embodiment, the ribozyme may be a trans-acting hammerhead ribozyme. A ribozyme site may be inserted in the payload construct within the 5′UTR or the 3′UTR of the payload or within the coding sequence.

[0414] In one embodiment, the regulatable element may be a riboswitch. In a non-limiting example, the riboswitch may be the inducible guanine-responsive GuaM8HDV aptazyme, which attenuates transgene expression upon a single addition of guanine, as described in Strobel et al., “Riboswitch-mediated Attenuation of Transgene Cytotoxicity Increases Adeno-associated Virus Vector Yields in HEK-293 Cells.” Mol Ther. 2015 Jul. 3, the contents of which is herein incorporated by reference in its entirety.

[0415] In one embodiment, the regulatable element comprising at least one polynucleotide, e.g. the siRNA, miRNA, antisense polynucleotide, ribozyme or riboswitch, is driven by a constitutive promoter.

[0416] In one embodiment, the regulatable element comprising at least one polynucleotide, e.g. the siRNA, miRNA, antisense polynucleotide, ribozyme or riboswitch, is driven by an inducible promoter.

[0417] In one embodiment, the regulatable element comprising at least one polynucleotide, e.g. the siRNA, miRNA, antisense polynucleotide, ribozyme or riboswitch, is driven by a tissue specific promoter.

[0418] In one embodiment, the regulatable system may further include additional regulatable elements, which may comprise any of the fusion proteins, enzymes and/or chemical compounds described herein.

[0419] As mentioned herein, tissue specific regulation of payload expression may also be mediated through tissue specific microRNAs. In one embodiment, one or more microRNA binding sites may be included in the payload construct to reduce or eliminate payload expression in a particular tissue.

### Regulatable Element: Destabilizing RNA Sequences

[0420] Heterologous UTRs or regulatable elements from heterologous UTRs can be incorporated into the UTRs of the payload or the regulatable element. Regulatable elements or sequences within the 5′ and 3′ UTRs will contribute to stabilizing or destabilizing the payload or regulatable element mRNA. For example, the 5′UTRs and 3′UTRs may include translational enhancer elements, which are well known in the art.

[0421] In one embodiment, the payload transcript may comprise a destabilizing sequence such as, but not limited to, a 3′UTR with AU-rich elements or AUUUA motifs. Destabilizing sequences are well known in the art and can for example be chosen from those in cytokines, proto-oncogenes, interferon mRNAs or human estrogen receptor alpha.

[0422] In one embodiment, the regulatable element may comprise a RNA binding protein, which can stabilize or destabilize the payload transcript.

[0423] As another a non-limiting example, the mRNA sequence for any regulatable element, including the inducible fusion proteins, and nucleases, such as cas9 or cas9 orthologs may comprise a destabilizing sequence, such as, but not limited to, a 3′UTR with AU-rich elements or AUUUA motifs. In some embodiments the UTRs employed are heterologous relative to the payload.

### Production of Viral Particles

[0424] The present disclosure provides a method for the generation of viral particles, by viral genome replication in a viral replication cell comprising contacting the viral replication cell with a payload construct vector and a viral construct vector.

[0425] The present disclosure provides a method for producing a viral particle having enhanced (increased, improved) transduction efficiency comprising the steps of: 1) co-transfecting competent bacterial cells with a bacmid vector and either a viral construct vector and/or payload construct vector, 2) isolating the resultant viral construct vector and payload construct vector and separately transfecting viral replication cells, 3) isolating and purifying resultant payload and viral construct particles comprising viral construct vector or payload construct vector, 4) co-infecting a viral replication cell with both the payload construct vector and viral construct vector, 5) harvesting and purifying the viral particle comprising a parvoviral genome. Production methods are further disclosed in commonly owned and co-pending International Publication No. WO2015191508, the contents of which are herein incorporated by reference in their entirety.

[0426] Vectors used in the production of viral particles include those encoding the payload, e.g. payload construct vectors, and those encoding accessory proteins necessary for production, e.g. viral construct vectors.

### Cells

[0427] Viral production of the invention disclosed herein describes processes and methods for producing viral particles (e.g., AAV particles and regulatable-AAV particles) that contact a target cell to deliver a payload construct, e.g. a recombinant viral construct, which comprises a nucleotide encoding a payload molecule.

[0428] In one embodiment, the viral particles (e.g., AAV particles and regulatable-AAV particles) of the invention may be produced in a viral replication cell that comprises an insect cell.

[0429] Growing conditions for insect cells in culture, and production of heterologous products in insect cells in culture are well-known in the art, see U.S. Pat. No. 6,204,059, the contents of which are herein incorporated by reference in their entirety.

[0430] Any insect cell which allows for replication of parvovirus and which can be maintained in culture can be used in accordance with the present invention. Cell lines may be used from Spodoptera frugiperda, including, but not limited to the Sf9 or Sf21 cell lines, drosophila cell lines, or mosquito cell lines, such as Aedes albopictus derived cell lines. Use of insect cells for expression of heterologous proteins is well documented, as are methods of introducing nucleic acids, such as vectors, e.g., insect-cell compatible vectors, into such cells and methods of maintaining such cells in culture. See, for example, METHODS IN MOLECULAR BIOLOGY, ed. Richard, Humana Press, N.J. (1995); O'Reilly et al., BACULOVIRUS EXPRESSION VECTORS, A LABORATORY MANUAL, Oxford Univ. Press (1994); Samulski et al., J. Vir. 63:3822-8 (1989); Kajigaya et al., Proc. Nat'l. Acad. Sci. USA 88: 4646-50 (1991); Ruffing et al., J. Vir. 66:6922-30 (1992); Kimbauer et al., Vir. 219:37-44 (1996); Zhao et al., Vir.272:382-93 (2000); and Samulski et al., U.S. Pat. No. 6,204,059, the contents of each of which are herein incorporated by reference in their entirety.

[0431] The viral replication cell may be selected from any biological organism, including prokaryotic (e.g., bacterial) cells, and eukaryotic cells, including, insect cells, yeast cells and mammalian cells. Viral replication cells may comprise mammalian cells such as HEK293, A549, WEH1, 3T3, 10T1/2, BHK, MDCK, COS 1, COS 7, BSC 1, BSC 40, BMT 10, VERO. W138, HeLa, HEK293, Saos, C2C12, L cells, HT1080, HepG2 and primary fibroblast, hepatocyte and myoblast cells derived from mammals. Viral replication cells of the invention comprise cells derived from mammalian species including, but not limited to, human, monkey, mouse, rat, rabbit, and hamster or cell type, including but not limited to fibroblast, hepatocyte, tumor cell, cell line transformed cell, etc.

### Small Scale Production

[0432] Viral production of the invention disclosed herein describes processes and methods for producing viral particles (e.g., AAV particles and regulatable-AAV particles) that contact a target cell to deliver a payload, e.g. a recombinant viral construct, which comprises a nucleotide encoding a payload.

[0433] In one embodiment, the viral particles (e.g., AAV particles and regulatable-AAV particles) of the invention may be produced in a viral replication cell that comprises a mammalian cell.

[0434] Viral replication cells commonly used for production of recombinant viral particles (e.g., AAV particles and regulatable-AAV particles) include, but is not limited to HEK293 cells, COS cells, HeLa cells, KB cells, and other mammalian cell lines as described in U.S. Pat. Nos. 6,156,303, 5,387,484, 5,741,683, 5,691,176, and 5,688,676; U.S. Patent Publication 2002/0081721, and International Patent Publications WO 00/47757, WO 00/24916, and WO 96/17947, the contents of each of which are herein incorporated by reference in their entireties.

[0435] In one embodiment, viral particles (e.g., AAV particles and regulatable-AAV particles) are produced in mammalian-cells wherein all three VP proteins are expressed at a stoichiometry approaching 1:1:10 (VP1:VP2:VP3). The regulatory mechanisms that allow this controlled level of expression include the production of two mRNAs, one for VP1, and the other for VP2 and VP3, produced by differential splicing.

[0436] In another embodiment, viral particles (e.g., AAV particles and regulatable-AAV particles) are produced in mammalian cells using a triple transfection method. As a non-limiting example, the payload construct, parvoviral Rep, and parvoviral Cap are comprised within three different constructs. The triple transfection method of the three components of AAV particle production may be utilized to produce small lots of virus for assays including transduction efficiency, target tissue (tropism) evaluation, and stability. As a non-limiting example, the triple transfection method includes, a payload construct, a rep/cap and a helper.

### Baculovirus

[0437] Provided herein are processes and methods for producing viral particles (e.g., AAV particles and regulatable-AAV particles) that contact a target cell to deliver a payload construct which comprises a nucleotide encoding a payload.

[0438] Briefly, the viral construct vector and the payload construct vector of the invention are each incorporated by a transposon donor/acceptor system into a bacmid, also known as a baculovirus plasmid, by standard molecular biology techniques known and performed by a person skilled in the art. Transfection of separate viral replication cell populations produces two baculoviruses, one that comprises the viral construct expression vector, and another that comprises the payload construct expression vector. The two baculoviruses may be used to infect a single viral replication cell population for production of particles.

[0439] Baculovirus expression vectors for producing viral particles in insect cells, including but not limited to Spodoptera frugiperda (Sf9) cells, provide high titers of viral particle product. Recombinant baculovirus encoding the viral construct expression vector and payload construct expression vector initiates a productive infection of viral replicating cells. Infectious baculovirus particles released from the primary infection secondarily infect additional cells in the culture, exponentially infecting the entire cell culture population in a number of infection cycles that is a function of the initial multiplicity of infection, see Urabe, M. et al. J Virol. 2006 February; 80 (4):1874-85, the contents of which are herein incorporated by reference in their entirety.

[0440] Production of particles with baculovirus in an insect cell system may address known baculovirus genetic and physical instability. In one embodiment, the production system of the invention addresses baculovirus instability over multiple passages by utilizing a titerless infected-cells preservation and scale-up system. Small scale seed cultures of viral producing cells are transfected with viral expression constructs encoding the structural, non-structural, components of the viral particle. Baculovirus-infected viral producing cells are harvested into aliquots that may be cryopreserved in liquid nitrogen; the aliquots retain viability and infectivity for infection of large scale viral producing cell culture Wasilko D J et al. Protein Expr Purif. 2009 June; 65(2):122-32, the contents of which are herein incorporated by reference in their entirety.

[0441] A genetically stable baculovirus may be used to produce the source of one or more of the components for producing particles in invertebrate cells. In one embodiment, defective baculovirus expression vectors may be maintained episomally in insect cells. In such an embodiment, the bacmid vector is engineered with replication control elements, including but not limited to promoters, enhancers, and/or cell-cycle regulated replication elements.

[0442] In one embodiment, baculoviruses may be engineered with a (non-) selectable marker for recombination into the chitinase/cathepsin locus. The chia/v-cath locus is non-essential for propagating baculovirus in tissue culture, and the V-cath (EC 3.4.22.50) is a cysteine endoprotease that is most active on Arg-Arg dipeptide containing substrates. The Arg-Arg dipeptide is present in densovirus and parvovirus capsid structural proteins but infrequently occurs in dependovirus VP1.

[0443] In one embodiment, stable viral replication cells permissive for baculovirus infection are engineered with at least one stable integrated copy of any of the elements necessary for AAV replication and viral particle production including, but not limited to, the entire AAV genome, Rep and Cap genes, Rep genes, Cap genes, each Rep protein as a separate transcription cassette, each VP protein as a separate transcription cassette, the AAP (assembly activation protein), or at least one of the baculovirus helper genes with native or non-native promoters.

### Large-Scale Production

[0444] In some embodiments, viral particles (e.g., AAV particles and regulatable-AAV particles) production may be modified to increase the scale of production. Large scale viral production methods according to the present invention may include any of those taught in U.S. Pat. Nos. 5,756,283, 6,258,595, 6,261,551, 6,270,996, 6,281,010, 6,365,394, 6,475,769, 6,482,634, 6,485,966, 6,943,019, 6,953,690, 7,022,519, 7,238,526, 7,291,498 and 7,491,508 or International Publication Nos. WO1996039530, WO1998010088, WO1999014354, WO1999015685, WO1999047691, WO2000055342, WO2000075353 and WO2001023597, the contents of each of which are herein incorporated by reference by reference in their entirety. Methods of increasing viral particle production scale typically comprise increasing the number of viral replication cells. In some embodiments, viral replication cells comprise adherent cells. To increase the scale of viral particle production by adherent viral replication cells, larger cell culture surfaces are required. In some cases, large-scale production methods comprise the use of roller bottles to increase cell culture surfaces. Other cell culture substrates with increased surface areas are known in the art. Examples of additional adherent cell culture products with increased surface areas include, but are not limited to CELLSTACK®, CELLCUBE® (Corning Corp., Corning, N.Y.) and NUNC CELL FACTORY™ (Thermo Scientific, Waltham, Mass.) In some cases, large-scale adherent cell surfaces may comprise from about 1,000 cm² to about 100,000 cm². In some cases, large-scale adherent cell cultures may comprise from about 10⁷ to about 10⁹ cells, from about 10⁸ to about 10¹⁰ cells, from about 10⁹ to about 10¹² cells or at least 10¹² cells. In some cases, large-scale adherent cultures may produce from about 10⁹ to about 10¹², from about 10¹⁰ to about 10¹³, from about 10¹¹ to about 10¹⁴, from about 10¹² to about 10¹⁵ or at least 10¹⁵ viral particles.

[0445] In some embodiments, large-scale viral production methods of the present invention may comprise the use of suspension cell cultures. Suspension cell culture allows for significantly increased numbers of cells. Typically, the number of adherent cells that can be grown on about 10-50 cm² of surface area can be grown in about 1 cm³ volume in suspension.

[0446] Transfection of replication cells in large-scale culture formats may be carried out according to any methods known in the art. For large-scale adherent cell cultures, transfection methods may include, but are not limited to the use of inorganic compounds (e.g. calcium phosphate,) organic compounds (e.g. polyethylenimine (PEI)) or the use of non-chemical methods (e.g. electroporation). With cells grown in suspension, transfection methods may include, but are not limited to the use of calcium phosphate and the use of PEI. In some cases, transfection of large scale suspension cultures may be carried out according to the section entitled “Transfection Procedure” described in Feng, L. et al., 2008. Biotechnol Appl. Biochem. 50:121-32, the contents of which are herein incorporated by reference in their entirety. According to such embodiments, PEI-DNA complexes may be formed for introduction of plasmids to be transfected. In some cases, cells being transfected with PEI-DNA complexes may be ‘shocked’ prior to transfection. This comprises lowering cell culture temperatures to 4° C. for a period of about 1 hour. In some cases, cell cultures may be shocked for a period of from about 10 minutes to about 5 hours. In some cases, cell cultures may be shocked at a temperature of from about 0° C. to about 20° C.

[0447] In some cases, transfections may include one or more vectors for expression of an RNA effector molecule to reduce expression of nucleic acids expression from one or more viral genomes. Such methods may enhance the production of viral particles by reducing cellular resources wasted on expressing payload constructs. In some cases, such methods may be carried according to those taught in US Publication No. US2014/0099666, the contents of which are herein incorporated by reference in their entirety.

### Bioreactors

[0448] In some embodiments, cell culture bioreactors may be used for large scale viral production. In some cases, bioreactors comprise stirred tank reactors. Such reactors generally comprise a vessel, typically cylindrical in shape, with a stirrer (e.g. impeller.) In some embodiments, such bioreactor vessels may be placed within a water jacket to control vessel temperature and/or to minimize effects from ambient temperature changes. Bioreactor vessel volume may range in size from about 500 ml to about 2 L, from about 1 L to about 5 L, from about 2.5 L to about 20 L, from about 10 L to about 50 L, from about 25 L to about 100 L, from about 75 L to about 500 L, from about 250 L to about 2,000 L, from about 1,000 L to about 10,000 L, from about 5,000 L to about 50,000 L or at least 50,000 L. Vessel bottoms may be rounded or flat. In some cases, animal cell cultures may be maintained in bioreactors with rounded vessel bottoms.

[0449] In some cases, bioreactor vessels may be warmed through the use of a thermocirculator. Thermocirculators pump heated water around water jackets. In some cases, heated water may be pumped through pipes (e.g. coiled pipes) that are present within bioreactor vessels. In some cases, warm air may be circulated around bioreactors, including, but not limited to air space directly above culture medium. Additionally, pH and CO₂ levels may be maintained to optimize cell viability.

[0450] In some cases, bioreactors may comprise hollow-fiber reactors. Hollow-fiber bioreactors may support the culture of both anchorage dependent and anchorage independent cells. Further bioreactors may include, but are not limited to packed-bed or fixed-bed bioreactors. Such bioreactors may comprise vessels with glass beads for adherent cell attachment. Further packed-bed reactors may comprise ceramic beads.

[0451] In some cases, viral particles are produced through the use of a disposable bioreactor. In some embodiments, such bioreactors may include WAVE disposable bioreactors.

[0452] In some embodiments, viral particle (e.g., AAV particles and regulatable-AAV particles) production in animal cell bioreactor cultures may be carried out according to the methods taught in U.S. Pat. Nos. 5,064764, 6,194,191, 6,566,118, 8,137,948 or US Patent Publication No. US2011/0229971, the contents of each of which are herein incorporated by reference in their entirety.

### Cell Lysis

[0453] Cells of the invention, including, but not limited to viral production cells, may be subjected to cell lysis according to any methods known in the art. Cell lysis may be carried out to obtain one or more agents (e.g. viral particles) present within any cells of the invention. In some embodiments, cell lysis may be carried out according to any of the methods listed in U.S. Pat. Nos. 7,326,555, 7,579,181, 7,048,920, 6,410,300, 6,436,394, 7,732,129, 7,510,875, 7,445,930, 6,726,907, 6,194,191, 7,125,706, 6,995,006, 6,676,935, 7,968,333, 5,756,283, 6,258,595, 6,261,551, 6,270,996, 6,281,010, 6,365,394, 6,475,769, 6,482,634, 6,485,966, 6,943,019, 6,953,690, 7,022,519, 7,238,526, 7,291,498 and 7,491,508 or International Publication Nos. WO1996039530, WO1998010088, WO1999014354, WO1999015685, WO1999047691, WO2000055342, WO2000075353 and WO2001023597, the contents of each of which are herein incorporated by reference in their entirety. Cell lysis methods may be chemical or mechanical. Chemical cell lysis typically comprises contacting one or more cells with one or more lysis agent. Mechanical lysis typically comprises subjecting one or more cells to one or more lysis conditions and/or one or more lysis forces.

[0454] In some embodiments, chemical lysis may be used to lyse cells. As used herein, the term “lysis agent” refers to any agent that may aid in the disruption of a cell. In some cases, lysis agents are introduced in solutions, termed lysis solutions or lysis buffers. As used herein, the term “lysis solution” refers to a solution (typically aqueous) comprising one or more lysis agents. In addition to lysis agents, lysis solutions may include one or more buffering agents, solubilizing agents, surfactants, preservatives, cryoprotectants, enzymes, enzyme inhibitors and/or chelators. Lysis buffers are lysis solutions comprising one or more buffering agent. Additional components of lysis solutions may include one or more solubilizing agents. As used herein, the term “solubilizing agent” refers to a compound that enhances the solubility of one or more components of a solution and/or the solubility of one or more entities to which solutions are applied. In some cases, solubilizing agents enhance protein solubility. In some cases, solubilizing agents are selected based on their ability to enhance protein solubility while maintaining protein conformation and/or activity.

[0455] Exemplary lysis agents may include any of those described in U.S. Pat. Nos. 8,685,734, 7,901,921, 7,732,129, 7,223,585, 7,125,706, 8,236,495, 8,110,351, 7,419,956, 7,300,797, 6,699,706 and 6,143,567, the contents of each of which are herein incorporated by reference in their entirety. In some cases, lysis agents may be selected from lysis salts, amphoteric agents, cationic agents, ionic detergents and non-ionic detergents. Lysis salts may include, but are not limited to sodium chloride (NaCl) and potassium chloride (KCl) Further lysis salts may include any of those described in U.S. Pat. Nos. 8,614,101, 7,326,555, 7,579,181, 7,048,920, 6,410,300, 6,436,394, 7,732,129, 7,510,875, 7,445,930, 6,726,907, 6,194,191, 7,125,706, 6,995,006, 6,676,935 and 7,968,333, the contents of each of which are herein incorporated by reference in their entirety. Concentrations of salts may be increased or decreased to obtain an effective concentration for rupture of cell membranes. Amphoteric agents, as referred to herein, are compounds capable of reacting as an acid or a base. Amphoteric agents may include, but are not limited to lysophosphatidylcholine, 3-((3-Cholamidopropyl) dimethylammonium)-1-propanesulfonate (CHAPS,) ZWITTERGENT® and the like. Cationic agents may include, but are not limited to cetyltrimethylammonium bromide (C (16) TAB) and Benzalkonium chloride. Lysis agents comprising detergents may include ionic detergents or non-ionic detergents. Detergents may function to break apart or dissolve cell structures including, but not limited to cell membranes, cell walls, lipids, carbohydrates, lipoproteins and glycoproteins. Exemplary ionic detergents include any of those taught in U.S. Pat. Nos. 7,625,570 and 6,593,123 or US Publication No. US2014/0087361, the contents of each of which are herein incorporated by reference in their entirety. Some ionic detergents may include, but are not limited to sodium dodecyl sulfate (SDS), cholate and deoxycholate. In some cases, ionic detergents may be included in lysis solutions as a solubilizing agent. Non-ionic detergents may include, but are not limited to octylglucoside, digitonin, lubrol, C12E8, TWEEN®-20, TWEEN®-80, Triton X-100 and Noniodet P-40. Non-ionic detergents are typically weaker lysis agents, but may be included as solubilizing agents for solubilizing cellular and/or viral proteins. Further lysis agents may include enzymes and urea. In some cases, one or more lysis agents may be combined in a lysis solution in order to enhance one or more of cell lysis and protein solubility. In some cases, enzyme inhibitors may be included in lysis solutions in order to prevent proteolysis that may be triggered by cell membrane disruption.

[0456] In some embodiments, mechanical cell lysis is carried out. Mechanical cell lysis methods may include the use of one or more lysis condition and/or one or more lysis force. As used herein, the term “lysis condition” refers to a state or circumstance that promotes cellular disruption. Lysis conditions may comprise certain temperatures, pressures, osmotic purity, salinity and the like. In some cases, lysis conditions comprise increased or decreased temperatures. According to some embodiments, lysis conditions comprise changes in temperature to promote cellular disruption. Cell lysis carried out according to such embodiments may include freeze-thaw lysis. As used herein, the term “freeze-thaw lysis” refers to cellular lysis in which a cell solution is subjected to one or more freeze-thaw cycle. According to freeze-thaw lysis methods, cells in solution are frozen to induce a mechanical disruption of cellular membranes caused by the formation and expansion of ice crystals. Cell solutions used according to freeze-thaw lysis methods, may further comprise one or more lysis agents, solubilizing agents, buffering agents, cryoprotectants, surfactants, preservatives, enzymes, enzyme inhibitors and/or chelators. Once cell solutions subjected to freezing are thawed, such components may enhance the recovery of desired cellular products. In some cases, one or more cyroprotectants are included in cell solutions undergoing freeze-thaw lysis. As used herein, the term “cryoprotectant” refers to an agent used to protect one or more substance from damage due to freezing. Cryoprotectants of the invention may include any of those taught in US Publication No. US2013/0323302 or U.S. Pat. Nos. 6,503,888, 6,180,613, 7,888,096, 7,091,030, the contents of each of which are herein incorporated by reference in their entirety. In some cases, cryoprotectants may include, but are not limited to dimethyl sulfoxide, 1,2-propanediol, 2,3-butanediol, formamide, glycerol, ethylene glycol, 1,3-propanediol and n-dimethyl formamide, polyvinylpyrrolidone, hydroxyethyl starch, agarose, dextrans, inositol, glucose, hydroxyethylstarch, lactose, sorbitol, methyl glucose, sucrose and urea. In some embodiments, freeze-thaw lysis may be carried out according to any of the methods described in U.S. Pat. No. 7,704,721, the contents of which are herein incorporated by reference in their entirety.

[0457] As used herein, the term “lysis force” refers to a physical activity used to disrupt a cell. Lysis forces may include, but are not limited to mechanical forces, sonic forces, gravitational forces, optical forces, electrical forces and the like. Cell lysis carried out by mechanical force is referred to herein as “mechanical lysis.” Mechanical forces that may be used according to mechanical lysis may include high shear fluid forces. According to such methods of mechanical lysis, a microfluidizer may be used. Microfluidizers typically comprise an inlet reservoir where cell solutions may be applied. Cell solutions may then be pumped into an interaction chamber via a pump (e.g. high-pressure pump) at high speed and/or pressure to produce shear fluid forces. Resulting lysates may then be collected in one or more output reservoirs. Pump speed and/or pressure may be adjusted to modulate cell lysis and enhance recovery of products (e.g. viral particles.) Other mechanical lysis methods may include physical disruption of cells by scraping.

[0458] Cell lysis methods may be selected based on the cell culture format of cells to be lysed. For example, with adherent cell cultures, some chemical and mechanical lysis methods may be used. Such mechanical lysis methods may include freeze-thaw lysis or scraping. In another example, chemical lysis of adherent cell cultures may be carried out through incubation with lysis solutions comprising surfactant, such as Triton-X-100. In some cases, cell lysates generated from adherent cell cultures may be treated with one more nucleases to lower the viscosity of the lysates caused by liberated DNA.

[0459] In one embodiment, a method for harvesting viral particles (e.g., AAV particles and regulatable-AAV particles) without lysis may be used for efficient and scalable viral particle production. In a non-limiting example, viral particles (e.g., AAV particles and regulatable-AAV particles) may be produced by culturing a viral particle lacking a heparin binding site, thereby allowing the viral particle to pass into the supernatant, in a cell culture, collecting supernatant from the culture; and isolating the viral particle from the supernatant, as described in US Patent Publication No. 20090275107, the contents of which is incorporated herein by reference in its entirety.

### Clarification

[0460] Cell lysates comprising viral particles (e.g., AAV particles and regulatable-AAV particles) may be subjected to clarification. Clarification refers to initial steps taken in purification of viral particles from cell lysates. Clarification serves to prepare lysates for further purification by removing larger, insoluble debris. Clarification steps may include, but are not limited to centrifugation and filtration. During clarification, centrifugation may be carried out at low speeds to remove larger debris, only. Similarly, filtration may be carried out using filters with larger pore sizes so that only larger debris is removed. In some cases, tangential flow filtration may be used during clarification. Objectives of viral clarification include high throughput processing of cell lysates and to optimize ultimate viral recovery. Advantages of including a clarification step include scalability for processing of larger volumes of lysate. In some embodiments, clarification may be carried out according to any of the methods presented in U.S. Pat. Nos. 8,524,446, 5,756,283, 6,258,595, 6,261,551, 6,270,996, 6,281,010, 6,365,394, 6,475,769, 6,482,634, 6,485,966, 6,943,019, 6,953,690, 7,022,519, 7,238,526, 7,291,498, 7,491,508, US Publication Nos. US2013/0045186, US2011/0263027, US2011/0151434, US2003/0138772, and International Publication Nos. WO2002012455, WO1996039530, WO1998010088, WO1999014354, WO1999015685, WO1999047691, WO2000055342, WO2000075353 and WO2001023597, the contents of each of which are herein incorporated by reference in their entirety.

[0461] Methods of cell lysate clarification by filtration are well understood in the art and may be carried out according to a variety of available methods including, but not limited to passive filtration and flow filtration. Filters used may comprise a variety of materials and pore sizes. For example, cell lysate filters may comprise pore sizes of from about 1 μM to about 5 μM, from about 0.5 μM to about 2 μM, from about 0.1 μM to about 1 μM, from about 0.05 μM to about 0.05 μM and from about 0.001 μM to about 0.1 μM. Exemplary pore sizes for cell lysate filters may include, but are not limited to, 2.0, 1.9, 1.8, 1.7, 1.6, 1.5, 1.4, 1.3, 1.2, 1.1, 1, 0.9, 0.8, 0.7, 0.6, 0.5, 0.4, 0.3, 0.2, 0.1, 0.95, 0.9, 0.85, 0.8, 0.75, 0.7, 0.65, 0.6, 0.55, 0.5, 0.45, 0.4, 0.35, 0.3, 0.25, 0.2, 0.15, 0.1, 0.05, 0.22, 0.21, 0.20, 0.19, 0.18, 0.17, 0.16, 0.15, 0.14, 0.13, 0.12, 0.11, 0.1, 0.09, 0.08, 0.07, 0.06, 0.05, 0.04, 0.03, 0.02, 0.01, 0.02, 0.019, 0.018, 0.017, 0.016, 0.015, 0.014, 0.013, 0.012, 0.011, 0.01, 0.009, 0.008, 0.007, 0.006, 0.005, 0.004, 0.003, 0.002, 0.001 and 0.001 μM. In one embodiment, clarification may comprise filtration through a filter with 2.0 μM pore size to remove large debris, followed by passage through a filter with 0.45 μM pore size to remove intact cells.

[0462] Filter materials may be composed of a variety of materials. Such materials may include, but are not limited to polymeric materials and metal materials (e.g. sintered metal and pored aluminum.) Exemplary materials may include, but are not limited to nylon, cellulose materials (e.g. cellulose acetate), polyvinylidene fluoride (PVDF), polyethersulfone, polyamide, polysulfone, polypropylene, and polyethylene terephthalate. In some cases, filters useful for clarification of cell lysates may include, but are not limited to ULTIPLEAT PROFILE™ filters (Pall Corporation, Port Washington, N.Y.), SUPOR™ membrane filters (Pall Corporation, Port Washington, N.Y.)

[0463] In some cases, flow filtration may be carried out to increase filtration speed and/or effectiveness. In some cases, flow filtration may comprise vacuum filtration. According to such methods, a vacuum is created on the side of the filter opposite that of cell lysate to be filtered. In some cases, cell lysates may be passed through filters by centrifugal forces. In some cases, a pump is used to force cell lysate through clarification filters. Flow rate of cell lysate through one or more filters may be modulated by adjusting channel size and/or fluid pressure.

[0464] According to some embodiments, cell lysates may be clarified by centrifugation. Centrifugation may be used to pellet insoluble particles in the lysate. During clarification, centrifugation strength [expressed in terms of gravitational units (g), which represents multiples of standard gravitational force] may be lower than in subsequent purification steps. In some cases, centrifugation may be carried out on cell lysates at from about 200 g to about 800 g, from about 500 g to about 1500 g, from about 1000 g to about 5000 g, from about 1200 g to about 10000 g or from about 8000 g to about 15000 g. In some embodiments, cell lysate centrifugation is carried out at 8000 g for 15 minutes. In some cases, density gradient centrifugation may be carried out in order to partition particulates in the cell lysate by sedimentation rate. Gradients used according to methods of the present invention may include, but are not limited to cesium chloride gradients and iodixanol step gradients.

### Purification: Chromatography

[0465] In some embodiments, viral particles (e.g., AAV particles and regulatable-AAV particles) may be purified from clarified cell lysates by one or more methods of chromatography. Chromatography refers to any number of methods known in the art for separating out one or more elements from a mixture. Such methods may include, but are not limited to ion exchange chromatography (e.g. cation exchange chromatography and anion exchange chromatography), immunoaffinity chromatography and size-exclusion chromatography. In some embodiments, methods of viral chromatography may include any of those taught in U.S. Pat. Nos. 5,756,283, 6,258,595, 6,261,551, 6,270,996, 6,281,010, 6,365,394, 6,475,769, 6,482,634, 6,485,966, 6,943,019, 6,953,690, 7,022,519, 7,238,526, 7,291,498 and 7,491,508 or International Publication Nos. WO1996039530, WO1998010088, WO1999014354, WO1999015685, WO1999047691, WO2000055342, WO2000075353 and WO2001023597, the contents of each of which are herein incorporated by reference by reference in their entirety.

[0466] In some embodiments, ion exchange chromatography may be used to isolate viral particles. Ion exchange chromatography is used to bind viral particles based on charge-charge interactions between capsid proteins and charged sites present on a stationary phase, typically a column through which viral preparations (e.g. clarified lysates) are passed. After application of viral preparations, bound viral particles may then be eluted by applying an elution solution to disrupt the charge-charge interactions. Elution solutions may be optimized by adjusting salt concentration and/or pH to enhance recovery of bound viral particles. Depending on the charge of viral capsids being isolated, cation or anion exchange chromatography methods may be selected. Methods of ion exchange chromatography may include, but are not limited to any of those taught in U.S. Pat. Nos. 7,419,817, 6,143,548, 7,094,604, 6,593,123, 7,015,026 and 8,137,948, the contents of each of which are herein incorporated by reference in their entirety.

[0467] In some embodiments, immunoaffinity chromatography may be used. Immunoaffinity chromatography is a form of chromatography that utilizes one or more immune compounds (e.g. antibodies or antibody-related structures) to retain viral particles. Immune compounds may bind specifically to one or more structures on viral particle surfaces, including, but not limited to one or more viral coat proteins. In some cases, immune compounds may be specific for a particular viral variant. In some cases, immune compounds may bind to multiple viral variants. In some embodiments, immune compounds may include recombinant single-chain antibodies. Such recombinant single chain antibodies may include those described in Smith, R. H. et al., 2009. Mol. Ther. 17(11):1888-96, the contents of which are herein incorporated by reference in their entirety. Such immune compounds are capable of binding to several AAV capsid variants, including, but not limited to AAV1, AAV2, AAV6 and AAV8.

[0468] In some embodiments, size-exclusion chromatography (SEC) may be used. SEC may comprise the use of a gel to separate particles according to size. In viral particle purification, SEC filtration is sometimes referred to as “polishing.” In some cases, SEC may be carried out to generate a final product that is near-homogenous. Such final products may in some cases be used in pre-clinical studies and/or clinical studies (Kotin, R. M. 2011. Human Molecular Genetics. 20(1):R2-R6, the contents of which are herein incorporated by reference in their entirety.) In some cases, SEC may be carried out according to any of the methods taught in U.S. Pat. Nos. 6,143,548, 7,015,026, 8,476,418, 6,410,300, 8,476,418, 7,419,817, 7,094,604, 6,593,123, and 8,137,948, the contents of each of which are herein incorporated by reference in their entirety.

[0469] In one embodiment, the compositions comprising at least one viral particle (e.g., AAV particle and regulatable-AAV particle) may be isolated or purified using the methods described in U.S. Pat. No. 6,146,874, the contents of which are herein incorporated by reference in its entirety.

[0470] In one embodiment, the compositions comprising at least one re viral particle (e.g., AAV particle and regulatable-AAV particle) may be isolated or purified using the methods described in U.S. Pat. No. 6,660,514, the contents of which are herein incorporated by reference in its entirety.

[0471] In one embodiment, the compositions comprising at least one viral particle (e.g., AAV particle and regulatable-AAV particle) may be isolated or purified using the methods described in U.S. Pat. No. 8,283,151, the contents of which are herein incorporated by reference in its entirety.

[0472] In one embodiment, the compositions comprising at least one viral particle (e.g., AAV particle and regulatable-AAV particle) may be isolated or purified using the methods described in U.S. Pat. No. 8,524,446, the contents of which are herein incorporated by reference in its entirety.

### Formulation and Delivery

[0473] According to the present invention the viral particles (e.g., AAV particles or regulatable-AAV particles) may be prepared as pharmaceutical compositions. It will be understood that such compositions necessarily comprise one or more active ingredients and, most often, a pharmaceutically acceptable excipient.

[0474] Relative amounts of the active ingredient (e.g. AAV particle or regulatable-AAV particle), a pharmaceutically acceptable excipient, and/or any additional ingredients in a pharmaceutical composition in accordance with the present disclosure may vary, depending upon the identity, size, and/or condition of the subject being treated and further depending upon the route by which the composition is to be administered. For example, the composition may comprise between 0.1% and 99% (w/w) of the active ingredient. By way of example, the composition may comprise between 0.1% and 100%, e.g., between 0.5 and 50%, between 1-30%, between 5-80%, at least 80% (w/w) active ingredient.

[0475] In some embodiments, the viral particles (e.g., AAV particle or regulatable-AAV particle) pharmaceutical compositions described herein may comprise at least one payload. As a non-limiting example, the pharmaceutical compositions may contain a viral particle with 1, 2, 3, 4 or 5 payloads.

[0476] Although the descriptions of pharmaceutical compositions provided herein are principally directed to pharmaceutical compositions which are suitable for administration to humans, it will be understood by the skilled artisan that such compositions are generally suitable for administration to any other animal, e.g., to non-human animals, e.g. non-human mammals. Modification of pharmaceutical compositions suitable for administration to humans in order to render the compositions suitable for administration to various animals is well understood, and the ordinarily skilled veterinary pharmacologist can design and/or perform such modification with merely ordinary, if any, experimentation. Subjects to which administration of the pharmaceutical compositions is contemplated include, but are not limited to, humans and/or other primates; mammals, including commercially relevant mammals such as cattle, pigs, horses, sheep, cats, dogs, mice, rats, birds, including commercially relevant birds such as poultry, chickens, ducks, geese, and/or turkeys.

[0477] In some embodiments, compositions are administered to humans, human patients or subjects.

[0478] In some embodiments, the chemical agent (e.g., drug, compound or ligand) may be formulated for delivery. The delivery compositions may comprise a pharmaceutically acceptable carrier or excipient and optionally a suitable adjuvant and may be administered via routes described in the art including but not limited to inhalation, insufflation, oral, buccal, parenteral, rectal, or transdermal.

[0479] In one embodiment, the present invention also provides pharmaceutical compositions comprising at least one viral particle (e.g., AAV particle or regulatable-AAV particle) having a regulatable element and a pharmaceutically acceptable excipient. In some aspects, one or more regulatable elements are contained in a viral particle (e.g., AAV particle or regulatable-AAV particle).

### Formulations

[0480] The viral particles (e.g., AAV particles or regulatable-AAV particles) of the invention can be formulated using one or more excipients to: (1) increase stability; (2) increase cell transfection or transduction; (3) permit the sustained or delayed expression of the payload; (4) alter the biodistribution (e.g., target the viral particle to specific tissues or cell types); (5) increase the translation of encoded protein; (6) alter the release profile of encoded protein and/or (7) allow for regulatable expression of the payload.

[0481] Formulations of the present invention can include, without limitation, saline, liposomes, lipid nanoparticles, polymers, peptides, proteins, cells transfected with viral genomes (e.g., for transfer or transplantation into a subject) and combinations thereof

[0482] Formulations of the pharmaceutical compositions described herein may be prepared by any method known or hereafter developed in the art of pharmacology. As used herein the term “pharmaceutical composition” refers to compositions comprising at least one active ingredient and optionally one or more pharmaceutically acceptable excipients.

[0483] In general, such preparatory methods include the step of associating the active ingredient with an excipient and/or one or more other accessory ingredients. As used herein, the phrase “active ingredient” generally refers either to a viral particle (e.g., AAV particle or regulatable-AAV particle) carrying a payload region encoding the polypeptides of the invention.

[0484] Formulations of the viral particles (e.g., AAV particles or regulatable-AAV particles) and pharmaceutical compositions described herein may be prepared by any method known or hereafter developed in the art of pharmacology. In general, such preparatory methods include the step of bringing the active ingredient into association with an excipient and/or one or more other accessory ingredients, and then, if necessary and/or desirable, dividing, shaping and/or packaging the product into a desired single- or multi-dose unit.

[0485] A pharmaceutical composition in accordance with the present disclosure may be prepared, packaged, and/or sold in bulk, as a single unit dose, and/or as a plurality of single unit doses. As used herein, a “unit dose” refers to a discrete amount of the pharmaceutical composition comprising a predetermined amount of the active ingredient. The amount of the active ingredient is generally equal to the dosage of the active ingredient which would be administered to a subject and/or a convenient fraction of such a dosage such as, for example, one-half or one-third of such a dosage.

[0486] In one embodiment, the viral particle (e.g., AAV particle or regulatable-AAV particle) of the invention may be formulated in PBS with 0.001% of pluronic acid (F-68) at a pH of about 7.0.

[0487] In some embodiments, the formulations described herein may contain sufficient viral particles (e.g., AAV particles or regulatable-AAV particles) for expression of at least one expressed payload. As a non-limiting example, the viral particles (e.g., AAV particles or regulatable-AAV particles) may contain viral genomes encoding 1, 2, 3, 4 or 5 payloads. In one embodiment, the formulation may contain a payload encoding proteins selected from categories such as, but not limited to, human proteins, veterinary proteins, bacterial proteins, biological proteins, antibodies, immunogenic proteins, therapeutic peptides and proteins, secreted proteins, plasma membrane proteins, cytoplasmic and cytoskeletal proteins, intracellular membrane bound proteins, nuclear proteins, proteins associated with human disease and/or proteins associated with non-human diseases.

[0488] According to the present invention, viral particles (e.g., AAV particles or regulatable-AAV particles) may be formulated for CNS delivery. Agents that cross the brain blood barrier may be used. For example, some cell penetrating peptides that can target molecules to the brain blood barrier endothelium may be used for formulation (e.g., Mathupala, Expert Opin Ther Pat., 2009, 19, 137-140; the content of which is incorporated herein by reference in its entirety).

[0489] In one embodiment, the viral particle may also encode a cell penetrating peptide. Delivery of a fusion protein comprising a recombinase and a cell penetrating peptide, the use of which is contemplated in one aspect of the current invention, is described in US Publication No. US20140127162, the contents of which is herein incorporated by reference in its entirety. Cell penetrating peptides are well known in the art and are for example described in Lundberg et al. (2002) A brief introduction to cell-penetrating peptides, J. Mol. Recognit. 16: 227-233, the contents of which is herein incorporated by reference in its entirety.

### Excipients and Diluents

[0490] The viral particles (e.g., AAV particles or regulatable-AAV particles) of the invention can be formulated using one or more excipients or diluents to (1) increase stability; (2) increase cell transfection or transduction; (3) permit the sustained or delayed release; (4) alter the biodistribution (e.g., target the viral particle to specific tissues or cell types); (5) increase the translation of encoded protein in vivo; (6) alter the release profile of encoded protein in vivo and/or (7) allow for regulatable expression of the polypeptides of the invention.

[0491] In some embodiments, a pharmaceutically acceptable excipient may be at least 95%, at least 96%, at least 97%, at least 98%, at least 99%, or 100% pure. In some embodiments, an excipient is approved for use for humans and for veterinary use. In some embodiments, an excipient may be approved by United States Food and Drug Administration. In some embodiments, an excipient may be of pharmaceutical grade. In some embodiments, an excipient may meet the standards of the United States Pharmacopoeia (USP), the European Pharmacopoeia (EP), the British Pharmacopoeia, and/or the International Pharmacopoeia.

[0492] Excipients, as used herein, include, but are not limited to, any and all solvents, dispersion media, diluents, or other liquid vehicles, dispersion or suspension aids, surface active agents, isotonic agents, thickening or emulsifying agents, preservatives, and the like, as suited to the particular dosage form desired. Various excipients for formulating pharmaceutical compositions and techniques for preparing the composition are known in the art (see Remington: The Science and Practice of Pharmacy, 21st Edition, A. R. Gennaro, Lippincott, Williams & Wilkins, Baltimore, Md., 2006; incorporated herein by reference in its entirety). The use of a conventional excipient medium may be contemplated within the scope of the present disclosure, except insofar as any conventional excipient medium may be incompatible with a substance or its derivatives, such as by producing any undesirable biological effect or otherwise interacting in a deleterious manner with any other component(s) of the pharmaceutical composition.

[0493] Exemplary diluents include, but are not limited to, calcium carbonate, sodium carbonate, calcium phosphate, dicalcium phosphate, calcium sulfate, calcium hydrogen phosphate, sodium phosphate lactose, sucrose, cellulose, microcrystalline cellulose, kaolin, mannitol, sorbitol, inositol, sodium chloride, dry starch, cornstarch, powdered sugar, etc., and/or combinations thereof.

### Inactive Ingredients

[0494] In some embodiments, viral particle (e.g., AAV particle or regulatable-AAV particle) formulations may comprise at least one inactive ingredient. As used herein, the term “inactive ingredient” refers to one or more agents that do not contribute to the activity of the active ingredient of the pharmaceutical composition included in formulations. In some embodiments, all, none or some of the inactive ingredients which may be used in the formulations of the present invention may be approved by the US Food and Drug Administration (FDA).

[0495] In one embodiment, the viral particle pharmaceutical compositions comprise at least one inactive ingredient such as, but not limited to, 1,2,6-Hexanetriol; 1,2-Dimyristoyl-Sn-Glycero-3-(Phospho-S-(1-Glycerol)); 1,2-Dimyristoyl-Sn-Glycero-3-Phosphocholine; 1,2-Dioleoyl-Sn-Glycero-3-Phosphocholine; 1,2-Dipalmitoyl-Sn-Glycero-3-(Phospho-Rac-(1-Glycerol)); 1,2-Distearoyl-Sn-Glycero-3-(Phospho-Rac-(1-Glycerol)); 1,2-Distearoyl-Sn-Glycero-3-Phosphocholine; 1-0-Tolylbiguanide; 2-Ethyl-1,6-Hexanediol; Acetic Acid; Acetic Acid, Glacial; Acetic Anhydride; Acetone; Acetone Sodium Bisulfite; Acetylated Lanolin Alcohols; Acetylated Monoglycerides; Acetylcysteine; Acetyltryptophan, DL-; Acrylates Copolymer; Acrylic Acid-Isooctyl Acrylate Copolymer; Acrylic Adhesive 788; Activated Charcoal; Adcote 72A103; Adhesive Tape; Adipic Acid; Aerotex Resin 3730; Alanine; Albumin Aggregated; Albumin Colloidal; Albumin Human; Alcohol; Alcohol, Dehydrated; Alcohol, Denatured; Alcohol, Diluted; Alfadex; Alginic Acid; Alkyl Ammonium Sulfonic Acid Betaine; Alkyl Aryl Sodium Sulfonate; Allantoin; Allyl .Alpha.-Ionone; Almond Oil; Alpha-Terpineol; Alpha-Tocopherol; Alpha-Tocopherol Acetate, Dl-; Alpha-Tocopherol, Dl-; Aluminum Acetate; Aluminum Chlorhydroxy Allantoinate; Aluminum Hydroxide; Aluminum Hydroxide - Sucrose, Hydrated; Aluminum Hydroxide Gel; Aluminum Hydroxide Gel F 500; Aluminum Hydroxide Gel F 5000; Aluminum Monostearate; Aluminum Oxide; Aluminum Polyester; Aluminum Silicate; Aluminum Starch Octenylsuccinate; Aluminum Stearate; Aluminum Subacetate; Aluminum Sulfate Anhydrous; Amerchol C; Amerchol-Cab; Aminomethylpropanol; Ammonia; Ammonia Solution; Ammonia Solution, Strong; Ammonium Acetate; Ammonium Hydroxide; Ammonium Lauryl Sulfate; Ammonium Nonoxynol-4 Sulfate; Ammonium Salt Of C-12-C-15 Linear Primary Alcohol Ethoxylate; Ammonium Sulfate; Ammonyx; Amphoteric-2; Amphoteric-9; Anethole; Anhydrous Citric Acid; Anhydrous Dextrose; Anhydrous Lactose; Anhydrous Trisodium Citrate; Aniseed Oil; Anoxid Sbn; Antifoam; Antipyrine; Apaflurane; Apricot Kernel Oil Peg-6 Esters; Aquaphor; Arginine; Arlacel; Ascorbic Acid; Ascorbyl Palmitate; Aspartic Acid; Balsam Peru; Barium Sulfate; Beeswax; Beeswax, Synthetic; Beheneth-10; Bentonite; Benzalkonium Chloride; Benzenesulfonic Acid; Benzethonium Chloride; Benzododecinium Bromide; Benzoic Acid; Benzyl Alcohol; Benzyl Benzoate; Benzyl Chloride; Betadex; Bibapcitide; Bismuth Subgallate; Boric Acid; Brocrinat; Butane; Butyl Alcohol; Butyl Ester Of Vinyl Methyl Ether/Maleic Anhydride Copolymer (125000 Mw); Butyl Stearate; Butylated Hydroxyanisole; Butylated Hydroxytoluene; Butylene Glycol; Butylparaben; Butyric Acid; C20-40 Pareth-24; Caffeine; Calcium; Calcium Carbonate; Calcium Chloride; Calcium Gluceptate; Calcium Hydroxide; Calcium Lactate; Calcobutrol; Caldiamide Sodium; Caloxetate Trisodium; Calteridol Calcium; Canada Balsam; Caprylic/Capric Triglyceride; Caprylic/Capric/Stearic Triglyceride; Captan; Captisol; Caramel; Carbomer 1342; Carbomer 1382; Carbomer 934; Carbomer 934p; Carbomer 940; Carbomer 941; Carbomer 980; Carbomer 981; Carbomer Homopolymer Type B (Allyl Pentaerythritol Crosslinked); Carbomer Homopolymer Type C (Allyl Pentaerythritol Crosslinked); Carbon Dioxide; Carboxy Vinyl Copolymer; Carboxymethylcellulose; Carboxymethylcellulose Sodium; Carboxypolymethylene; Carrageenan; Carrageenan Salt; Castor Oil; Cedar Leaf Oil; Cellulose; Cellulose, Microcrystalline; Cerasynt-Se; Ceresin; Ceteareth-12; Ceteareth-15; Ceteareth-30; Cetearyl Alcohol/Ceteareth-20; Cetearyl Ethylhexanoate; Ceteth-10; Ceteth-2; Ceteth-20; Ceteth-23; Cetostearyl Alcohol; Cetrimonium Chloride; Cetyl Alcohol; Cetyl Esters Wax; Cetyl Palmitate; Cetylpyridinium Chloride; Chlorobutanol; Chlorobutanol Hemihydrate; Chlorobutanol, Anhydrous; Chlorocresol; Chloroxylenol; Cholesterol; Choleth; Choleth-24; Citrate; Citric Acid; Citric Acid Monohydrate; Citric Acid, Hydrous; Cocamide Ether Sulfate; Cocamine Oxide; Coco Betaine; Coco Diethanolamide; Coco Monoethanolamide; Cocoa Butter; Coco-Glycerides; Coconut Oil; Coconut Oil, Hydrogenated; Coconut Oil/Palm Kernel Oil Glycerides, Hydrogenated; Cocoyl Caprylocaprate; Cola Nitida Seed Extract; Collagen; Coloring Suspension; Corn Oil; Cottonseed Oil; Cream Base; Creatine; Creatinine; Cresol; Croscarmellose Sodium; Crospovidone; Cupric Sulfate; Cupric Sulfate Anhydrous; Cyclomethicone; Cyclomethicone/Dimethicone Copolyol; Cysteine; Cysteine Hydrochloride; Cysteine Hydrochloride Anhydrous; Cysteine, Dl-; D&C Red No. 28; D&C Red No. 33; D&C Red No. 36; D&C Red No. 39; D&C Yellow No. 10; Dalfampridine; Daubert 1-5 Pestr (Matte) 164z; Decyl Methyl Sulfoxide; Dehydag Wax Sx; Dehydroacetic Acid; Dehymuls E; Denatonium Benzoate; Deoxycholic Acid; Dextran; Dextran 40; Dextrin; Dextrose; Dextrose Monohydrate; Dextrose Solution; Diatrizoic Acid; Diazolidinyl Urea; Dichlorobenzyl Alcohol; Dichlorodifluoromethane; Dichlorotetrafluoroethane; Diethanolamine; Diethyl Pyrocarbonate; Diethyl Sebacate; Diethylene Glycol Monoethyl Ether; Diethylhexyl Phthalate; Dihydroxyaluminum Aminoacetate; Diisopropanolamine; Diisopropyl Adipate; Diisopropyl Dilinoleate; Dimethicone 350; Dimethicone Copolyol; Dimethicone Mdx4-4210; Dimethicone Medical Fluid 360; Dimethyl Isosorbide; Dimethyl Sulfoxide; Dimethylaminoethyl Methacrylate-Butyl Methacrylate-Methyl Methacrylate Copolymer; Dimethyldioctadecylammonium Bentonite; Dimethylsiloxane/Methylvinylsiloxane Copolymer; Dinoseb Ammonium Salt; Dipalmitoylphosphatidylglycerol, Dl-; Dipropylene Glycol; Disodium Cocoamphodiacetate; Disodium Laureth Sulfosuccinate; Disodium Lauryl Sulfosuccinate; Disodium Sulfosalicylate; Disofenin; Divinylbenzene Styrene Copolymer; Dmdm Hydantoin; Docosanol; Docusate Sodium; Duro-Tak 280-2516; Duro-Tak 387-2516; Duro-Tak 80-1196; Duro-Tak 87-2070; Duro-Tak 87-2194; Duro-Tak 87-2287; Duro-Tak 87-2296; Duro-Tak 87-2888; Duro-Tak 87-2979; Edetate Calcium Disodium; Edetate Disodium; Edetate Disodium Anhydrous; Edetate Sodium; Edetic Acid; Egg Phospholipids; Entsufon; Entsufon Sodium; Epilactose; Epitetracycline Hydrochloride; Essence Bouquet 9200; Ethanolamine Hydrochloride; Ethyl Acetate; Ethyl Oleate; Ethylcelluloses; Ethylene Glycol; Ethylene Vinyl Acetate Copolymer; Ethylenediamine; Ethylenediamine Dihydrochloride; Ethylene-Propylene Copolymer; Ethylene-Vinyl Acetate Copolymer (28% Vinyl Acetate); Ethylene-Vinyl Acetate Copolymer (9% Vinylacetate); Ethylhexyl Hydroxystearate; Ethylparaben; Eucalyptol; Exametazime; Fat, Edible; Fat, Hard; Fatty Acid Esters; Fatty Acid Pentaerythriol Ester; Fatty Acids; Fatty Alcohol Citrate; Fatty Alcohols; Fd&C Blue No. 1; Fd&C Green No. 3; Fd&C Red No. 4; Fd&C Red No. 40; Fd&C Yellow No. 10 (Delisted); Fd&C Yellow No. 5; Fd&C Yellow No. 6; Ferric Chloride; Ferric Oxide; Flavor 89-186; Flavor 89-259; Flavor Df-119; Flavor Df-1530; Flavor Enhancer; Flavor Fig 827118; Flavor Raspberry Pfc-8407; Flavor Rhodia Pharmaceutical No. Rf 451; Fluorochlorohydrocarbons; Formaldehyde; Formaldehyde Solution; Fractionated Coconut Oil; Fragrance 3949-5; Fragrance 520a; Fragrance 6.007; Fragrance 91-122; Fragrance 9128-Y; Fragrance 93498g; Fragrance Balsam Pine No. 5124; Fragrance Bouquet 10328; Fragrance Chemoderm 6401-B; Fragrance Chemoderm 6411; Fragrance Cream No. 73457; Fragrance Cs-28197; Fragrance Felton 066m; Fragrance Firmenich 47373; Fragrance Givaudan Ess 9090/lc; Fragrance H-6540; Fragrance Herbal 10396; Fragrance Nj-1085; Fragrance P O Fl-147; Fragrance Pa 52805; Fragrance Pera Derm D; Fragrance Rbd-9819; Fragrance Shaw Mudge U-7776; Fragrance Tf 044078; Fragrance Ungerer Honeysuckle K 2771; Fragrance Ungerer N5195; Fructose; Gadolinium Oxide; Galactose; Gamma Cyclodextrin; Gelatin; Gelatin, Crosslinked; Gelfoam Sponge; Gellan Gum (Low Acyl); Gelva 737; Gentisic Acid; Gentisic Acid Ethanolamide; Gluceptate Sodium; Gluceptate Sodium Dihydrate; Gluconolactone; Glucuronic Acid; Glutamic Acid, Dl-; Glutathione; Glycerin; Glycerol Ester Of Hydrogenated Rosin; Glyceryl Citrate; Glyceryl Isostearate; Glyceryl Laurate; Glyceryl Monostearate; Glyceryl Oleate; Glyceryl Oleate/Propylene Glycol; Glyceryl Palmitate; Glyceryl Ricinoleate; Glyceryl Stearate; Glyceryl Stearate-Laureth-23; Glyceryl Stearate/Peg Stearate; Glyceryl Stearate/Peg-100 Stearate; Glyceryl Stearate/Peg-40 Stearate; Glyceryl Stearate-Stearamidoethyl Diethylamine; Glyceryl Trioleate; Glycine; Glycine Hydrochloride; Glycol Distearate; Glycol Stearate; Guanidine Hydrochloride; Guar Gum; Hair Conditioner (18n195-1m); Heptane; Hetastarch; Hexylene Glycol; High Density Polyethylene; Histidine; Human Albumin Microspheres; Hyaluronate Sodium; Hydrocarbon; Hydrocarbon Gel, Plasticized; Hydrochloric Acid; Hydrochloric Acid, Diluted; Hydrocortisone; Hydrogel Polymer; Hydrogen Peroxide; Hydrogenated Castor Oil; Hydrogenated Palm Oil; Hydrogenated Palm/Palm Kernel Oil Peg-6 Esters; Hydrogenated Polybutene 635-690; Hydroxide Ion; Hydroxyethyl Cellulose; Hydroxyethylpiperazine Ethane Sulfonic Acid; Hydroxymethyl Cellulose; Hydroxyoctacosanyl Hydroxystearate; Hydroxypropyl Cellulose; Hydroxypropyl Methylcellulose 2906; Hydroxypropyl-Beta-cyclodextrin; Hypromellose 2208 (15000 Mpa.S); Hypromellose 2910 (15000 Mpa.S); Hypromelloses; Imidurea; Iodine; lodoxamic Acid; lofetamine Hydrochloride; Irish Moss Extract; Isobutane; Isoceteth-20; Isoleucine; Isooctyl Acrylate; Isopropyl Alcohol; Isopropyl Isostearate; Isopropyl Myristate; Isopropyl Myristate-Myristyl Alcohol; Isopropyl Palmitate; Isopropyl Stearate; Isostearic Acid; Isostearyl Alcohol; Isotonic Sodium Chloride Solution; Jelene; Kaolin; Kathon Cg; Kathon Cg II; Lactate; Lactic Acid; Lactic Acid, Dl-; Lactic Acid, L-; Lactobionic Acid; Lactose; Lactose Monohydrate; Lactose, Hydrous; Laneth; Lanolin; Lanolin Alcohol-Mineral Oil; Lanolin Alcohols; Lanolin Anhydrous; Lanolin Cholesterols; Lanolin Nonionic Derivatives; Lanolin, Ethoxylated; Lanolin, Hydrogenated; Lauralkonium Chloride; Lauramine Oxide; Laurdimonium Hydrolyzed Animal Collagen; Laureth Sulfate; Laureth-2; Laureth-23; Laureth-4; Lauric Diethanolamide; Lauric Myristic Diethanolamide; Lauroyl Sarcosine; Lauryl Lactate; Lauryl Sulfate; Lavandula Angustifolia Flowering Top; Lecithin; Lecithin Unbleached; Lecithin, Egg; Lecithin, Hydrogenated; Lecithin, Hydrogenated Soy; Lecithin, Soybean; Lemon Oil; Leucine; Levulinic Acid; Lidofenin; Light Mineral Oil; Light Mineral Oil (85 Ssu); Limonene, (+/−)-; Lipocol Sc-15; Lysine; Lysine Acetate; Lysine Monohydrate; Magnesium Aluminum Silicate; Magnesium Aluminum Silicate Hydrate; Magnesium Chloride; Magnesium Nitrate; Magnesium Stearate; Maleic Acid; Mannitol; Maprofix; Mebrofenin; Medical Adhesive Modified 5-15; Medical Antiform A-F Emulsion; Medronate Disodium; Medronic Acid; Meglumine; Menthol; Metacresol; Metaphosphoric Acid; Methanesulfonic Acid; Methionine; Methyl Alcohol; Methyl Gluceth-10; Methyl Gluceth-20; Methyl Gluceth-20 Sesquistearate; Methyl Glucose Sesquistearate; Methyl Laurate; Methyl Pyrrolidone; Methyl Salicylate; Methyl Stearate; Methylboronic Acid; Methylcellulose (4000 Mpa. S); Methylcelluloses; Methylchloroisothiazolinone; Methylene Blue; Methylisothiazolinone; Methylparaben; Microcrystalline Wax; Mineral Oil; Mono And Diglyceride; Monostearyl Citrate; Monothioglycerol; Multisterol Extract; Myristyl Alcohol; Myristyl Lactate; Myristyl-.Gamma.-Picolinium Chloride; N-(Carbamoyl-Methoxy Peg-40)-1,2-Distearoyl-Cephalin Sodium; N,N-Dimethylacetamide; Niacinamide; Nioxime; Nitric Acid; Nitrogen; Nonoxynol Iodine; Nonoxynol-15; Nonoxynol-9; Norflurane; Oatmeal; Octadecene-1/Maleic Acid Copolymer; Octanoic Acid; Octisalate; Octoxynol-1; Octoxynol-40; Octoxynol-9; Octyldodecanol; Octylphenol Polymethylene; Oleic Acid; Oleth-10/01eth-5; Oleth-2; Oleth-20; Oleyl Alcohol; Oleyl Oleate; Olive Oil; Oxidronate Disodium; Oxyquinoline; Palm Kernel Oil; Palmitamine Oxide; Parabens; Paraffin; Paraffin, White Soft; Parfum Creme 45/3; Peanut Oil; Peanut Oil, Refined; Pectin; Peg 6-32 Stearate/Glycol Stearate; Peg Vegetable Oil; Peg-100 Stearate; Peg-12 Glyceryl Laurate; Peg-120 Glyceryl Stearate; Peg-120 Methyl Glucose Dioleate; Peg-15 Cocamine; Peg-150 Distearate; Peg-2 Stearate; Peg-20 Sorbitan Isostearate; Peg-22 Methyl Ether/Dodecyl Glycol Copolymer; Peg-25 Propylene Glycol Stearate; Peg-4 Dilaurate; Peg-4 Laurate; Peg-40 Castor Oil; Peg-40 Sorbitan Diisostearate; Peg-45/Dodecyl Glycol Copolymer; Peg-5 Oleate; Peg-50 Stearate; Peg-54 Hydrogenated Castor Oil; Peg-6 Isostearate; Peg-60 Castor Oil; Peg-60 Hydrogenated Castor Oil; Peg-7 Methyl Ether; Peg-75 Lanolin; Peg-8 Laurate; Peg-8 Stearate; Pegoxol 7 Stearate; Pentadecalactone; Pentaerythritol Cocoate; Pentasodium Pentetate; Pentetate Calcium Trisodium; Pentetic Acid; Peppermint Oil; Perflutren; Perfume 25677; Perfume Bouquet; Perfume E-1991; Perfume Gd 5604; Perfume Tana 90/42 Scba; Perfume W-1952-1; Petrolatum; Petrolatum, White; Petroleum Distillates; Phenol; Phenol, Liquefied; Phenonip; Phenoxyethanol; Phenylalanine; Phenylethyl Alcohol; Phenylmercuric Acetate; Phenylmercuric Nitrate; Phosphatidyl Glycerol, Egg; Phospholipid; Phospholipid, Egg; Phospholipon 90g; Phosphoric Acid; Pine Needle Oil (Pinus Sylvestris); Piperazine Hexahydrate; Plastibase-50w; Polacrilin; Polidronium Chloride; Poloxamer 124; Poloxamer 181; Poloxamer 182; Poloxamer 188; Poloxamer 237; Poloxamer 407; Poly(Bis(P-Carboxyphenoxy)Propane Anhydride): Sebacic Acid; Poly(Dimethylsiloxane/Methylvinylsiloxane/Methylhydrogensiloxane) Dimethylvinyl Or Dimethylhydroxy Or Trimethyl Endblocked; Poly(D1-Lactic-Co-Glycolic Acid), (50:50; Poly(Dl-Lactic-Co-Glycolic Acid), Ethyl Ester Terminated, (50:50; Polyacrylic Acid (250000 Mw); Polybutene (1400 Mw); Polycarbophil; Polyester; Polyester Polyamine Copolymer; Polyester Rayon; Polyethylene Glycol 1000; Polyethylene Glycol 1450; Polyethylene Glycol 1500; Polyethylene Glycol 1540; Polyethylene Glycol 200; Polyethylene Glycol 300; Polyethylene Glycol 300-1600; Polyethylene Glycol 3350; Polyethylene Glycol 400; Polyethylene Glycol 4000; Polyethylene Glycol 540; Polyethylene Glycol 600; Polyethylene Glycol 6000; Polyethylene Glycol 8000; Polyethylene Glycol 900; Polyethylene High Density Containing Ferric Oxide Black (<1%); Polyethylene Low Density Containing Barium Sulfate (20-24%); Polyethylene T; Polyethylene Terephthalates; Polyglactin; Polyglyceryl-3 Oleate; Polyglyceryl-4 Oleate; Polyhydroxyethyl Methacrylate; Polyisobutylene; Polyisobutylene (1100000 Mw); Polyisobutylene (35000 Mw); Polyisobutylene 178-236; Polyisobutylene 241-294; Polyisobutylene 35-39; Polyisobutylene Low Molecular Weight; Polyisobutylene Medium Molecular Weight; Polyisobutylene/Polybutene Adhesive; Polylactide; Polyols; Polyoxyethylene-Polyoxypropylene 1800; Polyoxyethylene Alcohols; Polyoxyethylene Fatty Acid Esters; Polyoxyethylene Propylene; Polyoxyl 20 Cetostearyl Ether; Polyoxyl 35 Castor Oil; Polyoxyl 40 Hydrogenated Castor Oil; Polyoxyl 40 Stearate; Polyoxyl 400 Stearate; Polyoxyl 6 And Polyoxyl 32 Palmitostearate; Polyoxyl Distearate; Polyoxyl Glyceryl Stearate; Polyoxyl Lanolin; Polyoxyl Palmitate; Polyoxyl Stearate; Polypropylene; Polypropylene Glycol; Polyquaternium-10; Polyquaternium-7 (70/30 Acrylamide/Dadmac; Polysiloxane; Polysorbate 20; Polysorbate 40; Polysorbate 60; Polysorbate 65; Polysorbate 80; Polyurethane; Polyvinyl Acetate; Polyvinyl Alcohol; Polyvinyl Chloride; Polyvinyl Chloride-Polyvinyl Acetate Copolymer; Polyvinylpyridine; Poppy Seed Oil; Potash; Potassium Acetate; Potassium Alum; Potassium Bicarbonate; Potassium Bisulfite; Potassium Chloride; Potassium Citrate; Potassium Hydroxide; Potassium Metabisulfite; Potassium Phosphate, Dibasic; Potassium Phosphate, Monobasic; Potassium Soap; Potassium Sorbate; Povidone Acrylate Copolymer; Povidone Hydrogel; Povidone K17; Povidone K25; Povidone K29/32; Povidone K30; Povidone K90; Povidone K90f; Povidone/Eicosene Copolymer; Povidones; Ppg-12/Smdi Copolymer; Ppg-15 Stearyl Ether; Ppg-20 Methyl Glucose Ether Distearate; Ppg-26 Oleate; Product Wat; Proline; Promulgen D; Promulgen G; Propane; Propellant A-46; Propyl Gallate; Propylene Carbonate; Propylene Glycol; Propylene Glycol Diacetate; Propylene Glycol Dicaprylate; Propylene Glycol Monolaurate; Propylene Glycol Monopalmitostearate; Propylene Glycol Palmitostearate; Propylene Glycol Ricinoleate; Propylene Glycol/Diazolidinyl Urea/Methylparaben/Propylparben; Propylparaben; Protamine Sulfate; Protein Hydrolysate; Pvm/Ma Copolymer; Quaternium-15; Quaternium-15 Cis-Form; Quaternium-52; Ra-2397; Ra-3011; Saccharin; Saccharin Sodium; Saccharin Sodium Anhydrous; Safflower Oil; Sd Alcohol 3a; Sd Alcohol 40; Sd Alcohol 40-2; Sd Alcohol 40b; Sepineo P 600; Serine; Sesame Oil; Shea Butter; Silastic Brand Medical Grade Tubing; Silastic Medical Adhesive,Silicone Type A; Silica, Dental; Silicon; Silicon Dioxide; Silicon Dioxide, Colloidal; Silicone; Silicone Adhesive 4102; Silicone Adhesive 4502; Silicone Adhesive Bio-Psa Q7-4201; Silicone Adhesive Bio-Psa Q7-4301; Silicone Emulsion; Silicone/Polyester Film Strip; Simethicone; Simethicone Emulsion; Sipon Ls 20np; Soda Ash; Sodium Acetate; Sodium Acetate Anhydrous; Sodium Alkyl Sulfate; Sodium Ascorbate; Sodium Benzoate; Sodium Bicarbonate; Sodium Bisulfate; Sodium Bisulfite; Sodium Borate; Sodium Borate Decahydrate; Sodium Carbonate; Sodium Carbonate Decahydrate; Sodium Carbonate Monohydrate; Sodium Cetostearyl Sulfate; Sodium Chlorate; Sodium Chloride; Sodium Chloride Injection; Sodium Chloride Injection, Bacteriostatic; Sodium Cholesteryl Sulfate; Sodium Citrate; Sodium Cocoyl Sarcosinate; Sodium Desoxycholate; Sodium Dithionite; Sodium Dodecylbenzenesulfonate; Sodium Formaldehyde Sulfoxylate; Sodium Gluconate; Sodium Hydroxide; Sodium Hypochlorite; Sodium Iodide; Sodium Lactate; Sodium Lactate, L-; Sodium Laureth-2 Sulfate; Sodium Laureth-3 Sulfate; Sodium Laureth-5 Sulfate; Sodium Lauroyl Sarcosinate; Sodium Lauryl Sulfate; Sodium Lauryl Sulfoacetate; Sodium Metabisulfite; Sodium Nitrate; Sodium Phosphate; Sodium Phosphate Dihydrate; Sodium Phosphate, Dibasic; Sodium Phosphate, Dibasic, Anhydrous; Sodium Phosphate, Dibasic, Dihydrate; Sodium Phosphate, Dibasic, Dodecahydrate; Sodium Phosphate, Dibasic, Heptahydrate; Sodium Phosphate, Monobasic; Sodium Phosphate, Monobasic, Anhydrous; Sodium Phosphate, Monobasic, Dihydrate; Sodium Phosphate, Monobasic, Monohydrate; Sodium Polyacrylate (2500000 Mw); Sodium Pyrophosphate; Sodium Pyrrolidone Carboxylate; Sodium Starch Glycolate; Sodium Succinate Hexahydrate; Sodium Sulfate; Sodium Sulfate Anhydrous; Sodium Sulfate Decahydrate; Sodium Sulfite; Sodium Sulfosuccinated Undecyclenic Monoalkylolamide; Sodium Tartrate; Sodium Thioglycolate; Sodium Thiomalate; Sodium Thiosulfate; Sodium Thiosulfate Anhydrous; Sodium Trimetaphosphate; Sodium Xylenesulfonate; Somay 44; Sorbic Acid; Sorbitan; Sorbitan Isostearate; Sorbitan Monolaurate; Sorbitan Monooleate; Sorbitan Monopalmitate; Sorbitan Monostearate; Sorbitan Sesquioleate; Sorbitan Trioleate; Sorbitan Tristearate; Sorbitol; Sorbitol Solution; Soybean Flour; Soybean Oil; Spearmint Oil; Spermaceti; Squalane; Stabilized Oxychloro Complex; Stannous 2-Ethylhexanoate; Stannous Chloride; Stannous Chloride Anhydrous; Stannous Fluoride; Stannous Tartrate; Starch; Starch 1500, Pregelatinized; Starch, Corn; Stearalkonium Chloride; Stearalkonium Hectorite/Propylene Carbonate; Stearamidoethyl Diethylamine; Steareth-10; Steareth-100; Steareth-2; Steareth-20; Steareth-21; Steareth-40; Stearic Acid; Stearic Diethanolamide; Stearoxytrimethylsilane; Steartrimonium Hydrolyzed Animal Collagen; Stearyl Alcohol; Sterile Water For Inhalation; Styrene/Isoprene/Styrene Block Copolymer; Succimer; Succinic Acid; Sucralose; Sucrose; Sucrose Distearate; Sucrose Polyesters; Sulfacetamide Sodium; Sulfobutylether.Beta.-Cyclodextrin; Sulfur Dioxide; Sulfuric Acid; Sulfurous Acid; Surfactol Qs; Tagatose, D-; Talc; Tall Oil; Tallow Glycerides; Tartaric Acid; Tartaric Acid, Dl-; Tenox; Tenox-2; Tert-Butyl Alcohol; Tert-Butyl Hydroperoxide; Tert-Butylhydroquinone; Tetrakis(2-Methoxyisobutylisocyanide)Copper(I) Tetrafluoroborate; Tetrapropyl Orthosilicate; Tetrofosmin; Theophylline; Thimerosal; Threonine; Thymol; Tin; Titanium Dioxide; Tocopherol; Tocophersolan; Total parenteral nutrition, lipid emulsion; Triacetin; Tricaprylin; Trichloromonofluoromethane; Trideceth-10; Triethanolamine Lauryl Sulfate; Trifluoroacetic Acid; Triglycerides, Medium Chain; Trihydroxystearin; Trilaneth-4 Phosphate; Trilaureth-4 Phosphate; Trisodium Citrate Dihydrate; Trisodium Hedta; Triton 720; Triton X-200; Trolamine; Tromantadine; Tromethamine (TRIS); Tryptophan; Tyloxapol; Tyrosine; Undecylenic Acid; Union 76 Amsco-Res 6038; Urea; Valine; Vegetable Oil; Vegetable Oil Glyceride, Hydrogenated; Vegetable Oil, Hydrogenated; Versetamide; Viscarin; Viscose/Cotton; Vitamin E; Wax, Emulsifying; Wecobee Fs; White Ceresin Wax; White Wax; Xanthan Gum; Zinc; Zinc Acetate; Zinc Carbonate; Zinc Chloride; and Zinc Oxide.

[0496] Pharmaceutical composition formulations of viral particles (e.g., AAV particles or regulatable-AAV particles) disclosed herein may include cations or anions. In one embodiment, the formulations include metal cations such as, but not limited to, Zn2+, Ca2+, Cu2+, Mn2+, Mg+ and combinations thereof. As a non-limiting example, formulations may include polymers and complexes with a metal cation (See e.g., U.S. Pat. Nos. 6,265,389 and 6,555,525, each of which is herein incorporated by reference in its entirety).

[0497] Formulations of the invention may also include one or more pharmaceutically acceptable salts. As used herein, “pharmaceutically acceptable salts” refers to derivatives of the disclosed compounds wherein the parent compound is modified by converting an existing acid or base moiety to its salt form (e.g., by reacting the free base group with a suitable organic acid). Examples of pharmaceutically acceptable salts include, but are not limited to, mineral or organic acid salts of basic residues such as amines; alkali or organic salts of acidic residues such as carboxylic acids; and the like. Representative acid addition salts include acetate, acetic acid, adipate, alginate, ascorbate, aspartate, benzenesulfonate, benzene sulfonic acid, benzoate, bisulfate, borate, butyrate, camphorate, camphorsulfonate, citrate, cyclopentanepropionate, digluconate, dodecylsulfate, ethanesulfonate, fumarate, glucoheptonate, glycerophosphate, hemisulfate, heptonate, hexanoate, hydrobromide, hydrochloride, hydroiodide, 2-hydroxy-ethanesulfonate, lactobionate, lactate, laurate, lauryl sulfate, malate, maleate, malonate, methanesulfonate, 2-naphthalenesulfonate, nicotinate, nitrate, oleate, oxalate, palmitate, pamoate, pectinate, persulfate, 3-phenylpropionate, phosphate, picrate, pivalate, propionate, stearate, succinate, sulfate, tartrate, thiocyanate, toluenesulfonate, undecanoate, valerate salts, and the like. Representative alkali or alkaline earth metal salts include sodium, lithium, potassium, calcium, magnesium, and the like, as well as nontoxic ammonium, quaternary ammonium, and amine cations, including, but not limited to ammonium, tetramethylammonium, tetraethylammonium, methylamine, dimethylamine, trimethylamine, triethylamine, ethylamine, and the like. The pharmaceutically acceptable salts of the present disclosure include the conventional non-toxic salts of the parent compound formed, for example, from non-toxic inorganic or organic acids.

[0498] Solvates may be prepared by crystallization, recrystallization, or precipitation from a solution that includes organic solvents, water, or a mixture thereof. Examples of suitable solvents are ethanol, water (for example, mono-, di-, and tri-hydrates), N-methylpyrrolidinone (NMP), dimethyl sulfoxide (DMSO), N,N′-dimethylformamide (DMF), N,N′-dimethylacetamide (DMAC), 1,3-dimethyl-2-imidazolidinone (DMEU), 1,3-dimethyl-3,4,5,6-tetrahydro-2-(1H)-pyrimidinone (DMPU), acetonitrile (ACN), propylene glycol, ethyl acetate, benzyl alcohol, 2-pyrrolidone, benzyl benzoate, and the like. When water is the solvent, the solvate is referred to as a “hydrate.”

### Administration

[0499] In one embodiment, the viral particles (e.g., AAV particles and regulatable-AAV particles) may be administered by any route which results in a therapeutically effective outcome. These include, but are not limited to enteral (into the intestine), gastroenteral, epidural (into the dura mater), oral (by way of the mouth), transdermal, peridural, intracerebral (into the cerebrum), intracerebroventricular (into the cerebral ventricles), epicutaneous (application onto the skin), intradermal, (into the skin itself), subcutaneous (under the skin), nasal administration (through the nose), intravenous (into a vein), intravenous bolus, intravenous drip, intraarterial (into an artery), intramuscular (into a muscle), intracardiac (into the heart), intraosseous infusion (into the bone marrow), intrathecal (into the spinal canal), intraperitoneal, (infusion or injection into the peritoneum), intravesical infusion, intravitreal, (through the eye), intracavernous injection (into a pathologic cavity) intracavitary (into the base of the penis), intravaginal administration, intrauterine, extra-amniotic administration, transdermal (diffusion through the intact skin for systemic distribution), transmucosal (diffusion through a mucous membrane), transvaginal, insufflation (snorting), sublingual, sublabial, enema, eye drops (onto the conjunctiva), in ear drops, auricular (in or by way of the ear), buccal (directed toward the cheek), conjunctival, cutaneous, dental (to a tooth or teeth), electro-osmosis, endocervical, endosinusial, endotracheal, extracorporeal, hemodialysis, infiltration, interstitial, intra-abdominal, intra-amniotic, intra-articular, intrabiliary, intrabronchial, intrabursal, intracartilaginous (within a cartilage), intracaudal (within the cauda equine), intracisternal (within the cisterna magna cerebellomedularis), intracorneal (within the cornea), dental intracornal, intracoronary (within the coronary arteries), intracorporus cavernosum (within the dilatable spaces of the corporus cavernosa of the penis), intradiscal (within a disc), intraductal (within a duct of a gland), intraduodenal (within the duodenum), intradural (within or beneath the dura), intraepidermal (to the epidermis), intraesophageal (to the esophagus), intragastric (within the stomach), intragingival (within the gingivae), intraileal (within the distal portion of the small intestine), intralesional (within or introduced directly to a localized lesion), intraluminal (within a lumen of a tube), intralymphatic (within the lymph), intramedullary (within the marrow cavity of a bone), intrameningeal (within the meninges), intraocular (within the eye), intraovarian (within the ovary), intrapericardial (within the pericardium), intrapleural (within the pleura), intraprostatic (within the prostate gland), intrapulmonary (within the lungs or its bronchi), intrasinal (within the nasal or periorbital sinuses), intraspinal (within the vertebral column), intrasynovial (within the synovial cavity of a joint), intratendinous (within a tendon), intratesticular (within the testicle), intrathecal (within the cerebrospinal fluid at any level of the cerebrospinal axis), intrathoracic (within the thorax), intratubular (within the tubules of an organ), intratumor (within a tumor), intratympanic (within the aurus media), intravascular (within a vessel or vessels), intraventricular (within a ventricle), iontophoresis (by means of electric current where ions of soluble salts migrate into the tissues of the body), irrigation (to bathe or flush open wounds or body cavities), laryngeal (directly upon the larynx), nasogastric (through the nose and into the stomach), occlusive dressing technique (topical route administration which is then covered by a dressing which occludes the area), ophthalmic (to the external eye), oropharyngeal (directly to the mouth and pharynx), parenteral, percutaneous, periarticular, peridural, perineural, periodontal, rectal, respiratory (within the respiratory tract by inhaling orally or nasally for local or systemic effect), retrobulbar (behind the pons or behind the eyeball), soft tissue, subarachnoid, subconjunctival, submucosal, topical, transplacental (through or across the placenta), transtracheal (through the wall of the trachea), transtympanic (across or through the tympanic cavity), ureteral (to the ureter), urethral (to the urethra), vaginal, caudal block, diagnostic, nerve block, biliary perfusion, cardiac perfusion, photopheresis or spinal. In specific embodiments, compositions may be administered in a way which allows them cross the blood-brain barrier, vascular barrier, or other epithelial barrier.

[0500] In one embodiment, a formulation for a route of administration may include at least one inactive ingredient.

[0501] In some embodiments, compositions may be administered in a way which allows them to cross the blood-brain barrier, vascular barrier, or other epithelial barrier. The viral particles (e.g., AAV particles or regulatable-AAV particles) of the present invention may be administered in any suitable form, either as a liquid solution or suspension, as a solid form suitable for liquid solution or suspension in a liquid solution. The viral particles (e.g., AAV particles or regulatable-AAV particles) may be formulated with any appropriate and pharmaceutically acceptable excipient.

[0502] In one embodiment, the viral particles (e.g., AAV particles or regulatable-AAV particles) of the present invention may be delivered to a subject via a single route administration.

[0503] In one embodiment, the viral particles (e.g., AAV particles or regulatable-AAV particles) of the present invention may be delivered to a subject via a multi-site route of administration. A subject may be administered at 2, 3, 4, 5 or more than 5 sites.

[0504] In one embodiment, a subject may be administered the viral particles (e.g., AAV particles or regulatable-AAV particles) of the present invention using a bolus infusion.

[0505] In one embodiment, a subject may be administered the viral particles (e.g., AAV particles or regulatable-AAV particles) of the present invention using sustained delivery over a period of minutes, hours or days. The infusion rate may be changed depending on the subject, distribution, formulation or another delivery parameter.

[0506] In one embodiment, the viral particles (e.g., AAV particles or regulatable-AAV particles) of the present invention may be delivered by intramuscular delivery route. (See, e.g., U.S. Pat. No. 6,506,379; the content of which is incorporated herein by reference in its entirety). Non-limiting examples of intramuscular administration include an intravenous injection or a subcutaneous injection.

[0507] In one embodiment, the viral particles (e.g., AAV particles or regulatable-AAV particles) of the present invention may be delivered by oral administration. Non-limiting examples of oral administration include a digestive tract administration and a buccal administration.

[0508] In one embodiment, the viral particles (e.g., AAV particles or regulatable-AAV particles) of the present invention may be delivered by intraocular delivery route. A non-limiting example of intraocular administration include an intravitreal injection.

[0509] In one embodiment, the viral particles (e.g., AAV particles or regulatable-AAV particles) of the present invention may be delivered by intranasal delivery route. Non-limiting examples of intranasal delivery include administration of nasal drops or nasal sprays.

[0510] In some embodiments, the viral particles (e.g., AAV particles or regulatable-AAV particles) that may be administered to a subject by peripheral injections. Non-limiting examples of peripheral injections include intraperitoneal, intramuscular, intravenous, conjunctival or joint injection. It was disclosed in the art that the peripheral administration of AAV vectors can be transported to the central nervous system, for example, to the motor neurons (e.g., U. S. Patent Publication Nos. 20100240739; and 20100130594; the content of each of which is incorporated herein by reference in their entirety).

[0511] In one embodiment, the viral particles (e.g., AAV particles or regulatable-AAV particles) may be delivered by injection into the CSF pathway. Non-limiting examples of delivery to the CSF pathway include intrathecal and intracerebroventricular administration.

[0512] In one embodiment, the viral particles (e.g., AAV particles or regulatable-AAV particles) may be delivered by systemic delivery. As a non-limiting example, the systemic delivery may be by intravascular administration.

[0513] In one embodiment, the viral particles (e.g., AAV particles or regulatable-AAV particles) of the present invention may be administered to a subject by intracranial delivery (See, e.g., U.S. Pat. No. 8,119,611; the content of which is incorporated herein by reference in its entirety).

[0514] In one embodiment, the viral particles (e.g., AAV particles or regulatable-AAV particles) of the present invention may be administered to a subject by intraparenchymal administration.

[0515] In one embodiment, the viral particles (e.g., AAV particles or regulatable-AAV particles) of the present invention may be administered to a subject by intramuscular administration.

[0516] In one embodiment, the viral particles (e.g., AAV particles or regulatable-AAV particles) of the present invention are administered to a subject and transduce muscle of a subject. As a non-limiting example, the viral particles (e.g., AAV particles or regulatable-AAV particles) are administered by intramuscular administration.

[0517] In one embodiment, the viral particles (e.g., AAV particles or regulatable-AAV particles) of the present invention may be administered to a subject by intravenous administration.

[0518] In one embodiment, the viral particles (e.g., AAV particles or regulatable-AAV particles) of the present invention may be administered to a subject by subcutaneous administration.

[0519] In one embodiment, the viral particles (e.g., AAV particles or regulatable-AAV particles) of the present invention may be administered to a subject by topical administration.

[0520] In one embodiment, the viral particles (e.g., AAV particles or regulatable-AAV particles) may be delivered by direct injection into the brain. As a non-limiting example, the brain delivery may be by intrastriatal administration.

[0521] In one embodiment, the viral particles (e.g., AAV particles or regulatable-AAV particles) may be delivered by more than one route of administration. As non-limiting examples of combination administrations, viral particles (e.g., AAV particles or regulatable-AAV particles) may be delivered by intrathecal and intracerebroventricular, or by intravenous and intraparenchymal administration.

[0522] In one embodiment, the viral particles (e.g., AAV particles or regulatable-AAV particles) comprising the various payload constructs may be administered simultaneously. In another embodiment, the viral particles (e.g., AAV particles or regulatable-AAV particles) may be administered sequentially. In some embodiments, the regulatable-AAV particles comprising the regulatable element may be delivered, 1, 2, 3, 4, 5, 6, or 7 days before or after the viral particles (e.g., AAV particles) comprising the payload encoding the gene of interest. In some embodiments, the regulatable-AAV particles comprising the regulatable element may be delivered, 1 to 4 weeks before or after the viral particles (e.g., AAV particles) comprising the payload encoding the gene of interest. In some embodiments, the regulatable-AAV particles comprising the regulatable element may be delivered, 1 month to 1 year before or after the viral particles (e.g., AAV particles) comprising the payload encoding the gene of interest. In some embodiments, the regulatable-AAV particles comprising the regulatable element may be delivered, 1 year to up to 5, 10, 20, 30, 40, 50, 60, or 70 years before or after the viral particles (e.g., AAV particles) comprising the payload encoding the gene of interest.

[0523] In some embodiments, multiple types of delivery methods may be used in combination to deliver different payload components. In one embodiment, a viral particle (e.g., AAV particle or regulatable-AAV particle) comprising the payload comprising the gene of interest is delivered in combination (simultaneously or sequentially) with one or more regulatable elements, which are delivered via a non-AAV vehicle or method. In another embodiment, the payload may be delivered using a non-AAV delivery vehicle or method and the one or more regulatable elements may be delivered as payloads contained in one or more regulatable-AAV particles. In one embodiment, a regulatable element may be delivered by a viral particle (e.g., AAV vector or regulatable-AAV vector). In one embodiment, the regulatable element may be delivered as an mRNA or formulated mRNA. In another embodiment, the payload may be delivered as an mRNA or formulated mRNA. In one embodiment, the regulatable element may be delivered as a protein or a formulated protein. In another embodiment, the payload may be delivered as a protein or a formulated protein.

### Combinations

[0524] In one embodiment, the viral particles may be used in combination with one or more other therapeutic, prophylactic, diagnostic, or imaging agents. By “in combination with,” it is not intended to imply that the agents must be administered at the same time and/or formulated for delivery together, although these methods of delivery are within the scope of the present disclosure. Compositions can be administered concurrently with, prior to, or subsequent to, one or more other desired therapeutics or medical procedures. In general, each agent will be administered at a dose and/or on a time schedule determined for that agent. In some embodiments, the present disclosure encompasses the delivery of pharmaceutical, prophylactic, diagnostic, or imaging compositions in combination with agents that may improve their bioavailability, reduce and/or modify their metabolism, inhibit their excretion, and/or modify their distribution within the body.

### Delivery to Cells

[0525] The present disclosure provides a method of delivering to a cell or tissue any of the viral particles, comprising contacting the cell or tissue with the viral particles or contacting the cell or tissue with a particle comprising the viral particles, or contacting the cell or tissue with any of the described compositions, including pharmaceutical compositions. The method of delivering the viral particles to a cell or tissue can be accomplished in vitro, ex vivo, or in vivo.

[0526] In one embodiment, the viral particles of the present invention may be administered to stem cells. The present disclosure provides a method of delivering to a stem cell any of the viral particles, comprising contacting the stem cell with the viral particles or contacting the stem cell with a particle comprising the viral particles, or contacting the stem cell with any of the described compositions, including pharmaceutical compositions.

[0527] In one embodiment, the viral particle may be an AAV particle which is delivered to a stem cell and may comprise an AAV Clade F capsid.

[0528] In one embodiment, the viral particle administered to cells comprises a correction genome as described in International Publication WO2016049230, the contents of which are herein incorporated by reference in their entirety. The correction genome comprises three elements, an internucleotide bond or nucleotide sequence for integration into a target locus of a mammalian chromosome, which serves as the editing element, and a 5′ and a 3′ homologous arm sequence at the 5′ and 3′ ends of the editing element respectively, which have homology to the 5′ region and the 3′ region of the mammalian chromosome relative to the target locus. Further, the correction genome may be characterized by the absence of a promoter operatively linked to the editing element nucleotide sequence. In some embodiments, the viral particle comprising a correction genome may be introduced to a stem cell (e.g., CD34+). In some embodiments, the cell may be transduced without exogenous nucleases. Genome editing by the correction genome (insertions, deletions, point mutations, alterations or any combination thereof) may be conducted ex vivo or in vivo in a subject in need thereof and may be used to treat a disease or disorder.

### Delivery to Subjects

[0529] The present disclosure additionally provides a method of delivering to a subject, including a mammalian subject, any of the above-described viral particles comprising administering to the subject the viral particles, or administering to the subject a viral particles, or administering to the subject any of the described compositions, including pharmaceutical compositions.

### Dosing

[0530] The present invention provides methods of administering viral particles (e.g., AAV particles or regulatable-AAV particles) and their payload or complexes in accordance with the invention to a subject in need thereof. Viral particle pharmaceutical, imaging, diagnostic, or prophylactic compositions thereof, may be administered to a subject using any amount and any route of administration effective for preventing, treating, diagnosing, or imaging a disease, disorder, and/or condition (e.g., a disease, disorder, and/or condition relating to working memory deficits). The exact amount required will vary from subject to subject, depending on the species, age, and general condition of the subject, the severity of the disease, the particular composition, its mode of administration, its mode of activity, and the like. Compositions in accordance with the invention are typically formulated in unit dosage form for ease of administration and uniformity of dosage. It will be understood, however, that the total daily usage of the compositions of the present invention may be decided by the attending physician within the scope of sound medical judgment. The specific therapeutically effective, prophylactically effective, or appropriate imaging dose level for any particular patient will depend upon a variety of factors including the disorder being treated and the severity of the disorder; the activity of the specific payload employed; the specific composition employed; the age, body weight, general health, sex and diet of the patient; the time of administration, route of administration, and rate of excretion of the specific payload employed; the duration of the treatment; drugs used in combination or coincidental with the specific payload employed; and like factors well known in the medical arts.

[0531] In certain embodiments, viral particle pharmaceutical compositions in accordance with the present invention may be administered at dosage levels sufficient to deliver from about 0.0001 mg/kg to about 100 mg/kg, from about 0.001 mg/kg to about 0.05 mg/kg, from about 0.005 mg/kg to about 0.05 mg/kg, from about 0.001 mg/kg to about 0.005 mg/kg, from about 0.05 mg/kg to about 0.5 mg/kg, from about 0.01 mg/kg to about 50 mg/kg, from about 0.1 mg/kg to about 40 mg/kg, from about 0.5 mg/kg to about 30 mg/kg, from about 0.01 mg/kg to about 10 mg/kg, from about 0.1 mg/kg to about 10 mg/kg, or from about 1 mg/kg to about 25 mg/kg, of subject body weight per day, one or more times a day, to obtain the desired therapeutic, diagnostic, prophylactic, or imaging effect. It will be understood that the above dosing concentrations may be converted to vg or viral genomes per kg or into total viral genomes administered by one of skill in the art.

[0532] In certain embodiments, viral particle pharmaceutical compositions in accordance with the present disclosure may be administered at about 10 to about 600 μl/site, 50 to about 500 μl/site, 100 to about 400 μl/site, 120 to about 300 μl/site, 140 to about 200 μl/site, about 160 μl/site. As non-limiting examples, viral particles may be administered at 50 μl/site and/or 150 μl/site.

[0533] The desired dosage may be delivered three times a day, two times a day, once a day, every other day, every third day, every week, every two weeks, every three weeks, or every four weeks. In certain embodiments, the desired dosage may be delivered using multiple administrations (e.g., two, three, four, five, six, seven, eight, nine, ten, eleven, twelve, thirteen, fourteen, or more administrations). When multiple administrations are employed, split dosing regimens such as those described herein may be used. As used herein, a “split dose” is the division of single unit dose or total daily dose into two or more doses, e.g., two or more administrations of the single unit dose. As used herein, a “single unit dose” is a dose of any therapeutic administered in one dose/at one time/single route/single point of contact, i.e., single administration event. As used herein, a “total daily dose” is an amount given or prescribed in 24 hour period. It may be administered as a single unit dose. In one embodiment, the viral particles of the present invention are administered to a subject in split doses. The viral particles may be formulated in buffer only or in a formulation described herein.

[0534] A pharmaceutical composition described herein can be formulated into a dosage form described herein, such as a topical, intranasal, pulmonary, intratracheal, or injectable (e.g., intravenous, intraocular, intravitreal, intramuscular, intracardiac, intraperitoneal, and/or subcutaneous).

[0535] In one embodiment, delivery of the viral particles of the present invention to a subject provides neutralizing activity to a subject. The neutralizing activity can be for at least 1 month, 2 months, 3 months, 4 months, 5 months, 6 months, 7 months, 8 months, 9 months, 10 months, 11 months, 1 year, 13 months, 14 months, 15 months, 16 months, 17 months, 18 months, 19 months, 20 months, 20 months, 21 months, 22 months, 23 months, 2 years, 3 years, 4 years, 5 years, 6 years, 7 years, 8 years, 9 years, 10 years or more than 10 years.

[0536] In one embodiment, delivery of the viral particles of the present invention results in minimal serious adverse events (SAEs) as a result of the delivery of the viral particles.

[0537] In one embodiment, delivery of viral particles to cells of the central nervous system (e.g., parenchyma) may comprise a total dose between about 1×10⁶ VG and about 1×10¹⁶ VG. In some embodiments, delivery may comprise a total dose of about 1×10⁶, 2×10⁶, 3×10⁶, 4×10⁶, 5×10⁶, 6×10⁶, 7×10⁶, 8×10⁶, 9×10⁶, 1×10⁷, 2×10⁷, 3×10⁷, 4×10⁷, 5×10⁷, 6×10⁷, 7×10⁷, 8×10⁷, 9×10⁷, 1×10⁸, 2×10⁸, 3×10⁸, 4×10⁸, 5×10⁸, 6×10⁸, 7×10⁸, 8×10⁸, 9×10⁸, 1×10⁹, 2×10⁹, 3×10⁹, 4×10⁹, 5×10⁹, 6×10⁹, 7×10⁹, 8×10⁹, 9×10⁹, 1×10¹⁰, 1.9×10¹⁰, 2×10¹⁰, 3×10¹⁰, 3.73×10¹⁰, 4×10¹⁰, 5×10¹⁰, 6×10¹⁰, 7×10¹⁰, 8×10¹⁰, 9×10¹⁰, 1×10¹¹, 2×10¹¹, 2.5×10¹¹, 3×10¹¹, 4×10¹¹, 5×10¹¹, 6×10¹¹, 7×10¹¹, 8×10¹¹, 9×10¹¹, 1×10¹², 2×10¹², 3×10¹², 4×10¹², 5×10¹², 6×10¹², 7×10¹², 8×10¹², 9×10¹², 1×10¹³, 2×10¹³, 3×10¹³, 4×10¹³, 5×10¹³, 6×10¹³, 7×10¹³, 8×10¹³, 9×10¹³, 1×10¹⁴, 2×10¹⁴, 3×10¹⁴, 4×10¹⁴, 5×10¹⁴, 6×10¹⁴, 7×10¹⁴, 8×10¹⁴, 9×10¹⁴, 1×10¹⁵, 2×10¹⁵, 3×10¹⁵, 4×10¹⁵, 5×10¹⁵, 6×10¹⁵, 7×10¹⁵, 8×10¹⁵, 9×10¹⁵, or 1×10¹⁶ VG. As a non-limiting example, the total dose is 1×10¹³ VG. As another non-limiting example, the total dose is 2.1×10¹² VG.

[0538] In one embodiment, delivery of viral particles to cells of the central nervous system may comprise a composition concentration between about 1×10⁶ VG/mL and about 1×10¹⁶ VG/mL. In some embodiments, delivery may comprise a composition concentration of about 1×10⁶, 2×10⁶, 3×10⁶, 4×10⁶, 5×10⁶, 6×10⁶, 7×10⁶, 8×10⁶, 9×10⁶, 1×10⁷, 2×10⁷, 3×10⁷, 4×10⁷, 5×10⁷, 6×10⁷, 7×10⁷, 8×10⁷, 9×10⁷, 1×10⁸, 2×10⁸, 3×10⁸, 4×10⁸, 5×10⁸, 6×10⁸, 7×10⁸, 8×10⁸, 9×10⁸, 1×10⁹, 2×10⁹, 3×10⁹, 4×10⁹, 5×10⁹, 6×10⁹, 7×10⁹, 8×10⁹, 9×10⁹, 1×10¹⁰, 2×10¹⁰, 3×10¹⁰, 4×10¹⁰, 5×10¹⁰, 6×10¹⁰, 7×10¹⁰, 8×10¹⁰, 9×10¹⁰, 1×10¹¹, 2×10¹¹, 3×10¹¹, 4×10¹¹, 5×10¹¹, 6×10¹¹, 7×10¹¹, 8×10¹¹, 9×10¹¹, 1×10¹², 2×10¹², 3×10¹², 4×10¹², 5×10¹², 6×10¹², 7×10¹², 8×10¹², 9×10¹², 1×10¹³, 2×10¹³, 3×10¹³, 4×10¹³, 5×10¹³, 6×10¹³, 7×10¹³, 8×10¹³, 9×10¹³, 1×10¹⁴, 2×10¹⁴, 3×10¹⁴, 4×10¹⁴, 5×10¹⁴, 6×10¹⁴, 7×10¹⁴, 8×10¹⁴, 9×10¹⁴, 1×10¹⁵, 2×10¹⁵, 3×10¹⁵, 4×10¹⁵, 5×10¹⁵, 6×10¹⁵, 7×10¹⁵, 8×10¹⁵, 9×10¹⁵, or 1×10¹⁶ VG/mL. In one embodiment, the delivery comprises a composition concentration of 1×10¹³ VG/mL. In one embodiment, the delivery comprises a composition concentration of 2.1×10¹² VG/mL.

### Measurement of Expression

[0539] Expression of payloads from viral genomes may be determined using various methods known in the art such as, but not limited to immunochemistry (e.g., IHC), in situ hybridization (ISH), enzyme-linked immunosorbent assay (ELISA), affinity ELISA, ELISPOT, flow cytometry, immunocytology, surface plasmon resonance analysis, kinetic exclusion assay, liquid chromatography-mass spectrometry (LCMS), high-performance liquid chromatography (HPLC), BCA assay, immunoelectrophoresis, Western blot, SDS-PAGE, protein immunoprecipitation, and/or PCR.

### Bioavailability

[0540] The viral particles, when formulated into a composition with a delivery agent as described herein, can exhibit an increase in bioavailability as compared to a composition lacking a delivery agent as described herein. As used herein, the term “bioavailability” refers to the systemic availability of a given amount of viral particle or expressed payload administered to a mammal. Bioavailability can be assessed by measuring the area under the curve (AUC) or the maximum serum or plasma concentration (Cₘₐₓ) of the composition following. AUC is a determination of the area under the curve plotting the serum or plasma concentration of a compound (e.g., viral particles or expressed payloads) along the ordinate (Y-axis) against time along the abscissa (X-axis). Generally, the AUC for a particular compound can be calculated using methods known to those of ordinary skill in the art and as described in G. S. Banker, Modern Pharmaceutics, Drugs and the Pharmaceutical Sciences, v. 72, Marcel Dekker, New York, Inc., 1996, the contents of which are herein incorporated by reference in its entirety.

[0541] The Cₘₐₓ value is the maximum concentration of the viral particle or expressed payload achieved in the serum or plasma of a mammal following administration of the viral particle to the mammal. The Cₘₐₓ value of can be measured using methods known to those of ordinary skill in the art. The phrases “increasing bioavailability” or “improving the pharmacokinetics,” as used herein mean that the systemic availability of a first viral particle or expressed payload, measured as AUC, Cₘₐₓ, or Cₘᵢₙ in a mammal is greater, when co-administered with a delivery agent as described herein, than when such co-administration does not take place. In some embodiments, the bioavailability can increase by at least about 2%, at least about 5%, at least about 10%, at least about 15%, at least about 20%, at least about 25%, at least about 30%, at least about 35%, at least about 40%, at least about 45%, at least about 50%, at least about 55%, at least about 60%, at least about 65%, at least about 70%, at least about 75%, at least about 80%, at least about 85%, at least about 90%, at least about 95%, or about 100%.

### Therapeutic Window

[0542] As used herein “therapeutic window” refers to the range of plasma concentrations, or the range of levels of therapeutically active substance at the site of action, with a high probability of eliciting a therapeutic effect. In some embodiments, the therapeutic window of the viral particle as described herein can increase by at least about 2%, at least about 5%, at least about 10%, at least about 15%, at least about 20%, at least about 25%, at least about 30%, at least about 35%, at least about 40%, at least about 45%, at least about 50%, at least about 55%, at least about 60%, at least about 65%, at least about 70%, at least about 75%, at least about 80%, at least about 85%, at least about 90%, at least about 95%, or about 100%.

### Volume of Distribution

[0543] As used herein, the term “volume of distribution” refers to the fluid volume that would be required to contain the total amount of the drug in the body at the same concentration as in the blood or plasma: Vdist equals the amount of drug in the body/concentration of drug in blood or plasma. For example, for a 10 mg dose and a plasma concentration of 10 mg/L, the volume of distribution would be 1 liter. The volume of distribution reflects the extent to which the drug is present in the extravascular tissue. A large volume of distribution reflects the tendency of a compound to bind to the tissue components compared with plasma protein binding. In a clinical setting, V_{d}ist can be used to determine a loading dose to achieve a steady state concentration. In some embodiments, the volume of distribution of the viral particles as described herein can decrease at least about 2%, at least about 5%, at least about 10%, at least about 15%, at least about 20%, at least about 25%, at least about 30%, at least about 35%, at least about 40%, at least about 45%, at least about 50%, at least about 55%, at least about 60%, at least about 65%, at least about 70%.

### Biological Effect

[0544] In one embodiment, the biological effect of the viral particles delivered to the animals may be categorized by analyzing the payload expression in the animals. The payload expression may be determined from analyzing a biological sample collected from a mammal administered the viral particles of the present invention. For example, a protein expression of 50-200 pg/ml for the protein encoded by the viral particles delivered to the mammal may be seen as a therapeutically effective amount of protein in the mammal.

### Methods of Use

[0545] The present disclosure additionally provides a method for treating a disease, disorder and/or condition in a mammalian subject, including a human subject, comprising administering to the subject any of viral genomes (“VG”) or administering to the subject a viral particle comprising a viral genome, or administering to the subject any of the described compositions, including pharmaceutical compositions.

[0546] In some embodiments, the present invention provides methods for inhibiting, silencing or inducing, activating, and/or initiating expression of a gene in a cell.

[0547] In one embodiment, the disease, disorder and/or condition is a neurological disease, disorder and/or condition.

[0548] In one embodiment, the neurological disease, disorder and/or condition is Parkinson's disease.

[0549] In one embodiment, the neurological disease, disorder and/or condition is Friedreich's Ataxia.

[0550] In one embodiment, the neurological disease, disorder and/or condition is Amyotrophic lateral sclerosis (ALS).

[0551] In one embodiment, the neurological disease, disorder and/or condition is Huntington's disease.

[0552] In one embodiment, the neurological disease, disorder and/or condition is spinal muscular atrophy (SMA).

[0553] In one embodiment, the neurological disease, disorder and/or condition is a muscular or cardiac disease, disorder and/or condition.

[0554] In one embodiment, the neurological disease, disorder and/or condition is an immune system disease, disorder and/or condition.

[0555] In one embodiment, the neurological disease, disorder and/or condition is a disease, disorder and/or condition of the CNS.

[0556] In one embodiment, neurological disease, disorder and/or condition is Alzheimer's Disease.

[0557] The polynucleotides encoding polypeptides (e.g., mRNA) of the invention may be useful in the fields of human disease, antibodies, viruses, veterinary applications and a variety of in vivo and in vitro settings.

[0558] In some embodiments, the viral particles are useful in the field of medicine for the treatment, palliation or amelioration of conditions or diseases such as, but not limited to, blood, cardiovascular, CNS, dermatology, endocrinology, genetic, genitourinary, gastrointestinal, musculoskeletal, oncology, and immunology, respiratory, sensory and anti-infective.

[0559] In one embodiment, the viral particles are useful in the treatment of Duchenne muscular dystrophy or Becker muscular dystrophy.

[0560] In some embodiments, viral particles in accordance with the present invention may be used for the treatment of disorders, and/or conditions, including but not limited to one or more of the following: autoimmune disorders (e.g. diabetes, lupus, multiple sclerosis, psoriasis, rheumatoid arthritis); inflammatory disorders (e.g. arthritis, pelvic inflammatory disease); neurological disorders (e.g. Alzheimer's disease, Huntington's disease; autism; Parkinson's disease, amyotrophic lateral sclerosis, Friedrich's Ataxia, spinal muscular atrophy, schizophrenia); cardiovascular disorders (e.g. atherosclerosis, hypercholesterolemia, thrombosis, clotting disorders, angiogenic disorders such as macular degeneration; proliferative disorders (e.g. cancer, benign neoplasms); respiratory disorders (e.g. chronic obstructive pulmonary disease); digestive disorders (e.g. inflammatory bowel disease, ulcers); musculoskeletal disorders (e.g. fibromyalgia, arthritis, Duchenne muscular dystrophy, Becker muscular dystrophy); endocrine, metabolic, and nutritional disorders (e.g. diabetes, osteoporosis); urological disorders (e.g. renal disease); psychological disorders (e.g. depression, schizophrenia); skin disorders (e.g. wounds, eczema); blood and lymphatic disorders (e.g. anemia, hemophilia).

### Definitions

[0561] At various places in the present specification, substituents of compounds of the present disclosure are disclosed in groups or in ranges. It is specifically intended that the present disclosure include each and every individual sub-combination of the members of such groups and ranges. The following is a non-limiting list of term definitions.

[0562] Adeno-associated virus: The term “adeno-associated virus” or “AAV” as used herein refers to members of the dependovirus genus comprising any particle, sequence, gene, protein, or component derived therefrom.

[0563] Adeno-associated virus particle or AAV particle: As used herein, the term “adeno-associated virus particle” or “AAV particle” refers to a viral particle where the virus is adeno-associated virus (AAV). The AAV particle may be derived from any serotype, described herein or known in the art, including combinations of serotypes (i.e., “pseudotyped” AAV) or from various genomes (e.g., single stranded or self-complementary). In addition, the AAV particle may be replication defective and/or targeted.

[0564] Activity: As used herein, the term “activity” refers to the condition in which things are happening or being done. Compositions of the invention may have activity and this activity may involve one or more biological events.

[0565] Administered in combination: As used herein, the term “administered in combination” or “combined administration” refers to simultaneous exposure to two or more agents administered at the same time or within an interval such that the subject is at some point in time simultaneously exposed to both and/or such that there may be an overlap in the effect of each agent on the patient. In some embodiments, at least one dose of one or more agents is administered within about 24 hours, 12 hours, 6 hours, 3 hours, 1 hour, 30 minutes, 15 minutes, 10 minutes, 5 minutes, or 1 minute of at least one dose of one or more other agents. In some embodiments, administration occurs in overlapping dosage regimens. As used herein, the term “dosage regimen” refers to a plurality of doses spaced apart in time. Such doses may occur at regular intervals or may include one or more hiatus in administration. In some embodiments, the administration of individual doses of one or more compounds and/or compositions of the present invention, as described herein, are spaced sufficiently closely together such that a combinatorial (e.g., a synergistic) effect is achieved.

[0566] Amelioration: As used herein, the term “amelioration” or “ameliorating” refers to a lessening of severity of at least one indicator of a condition or disease. For example, in the context of neurodegeneration disorder, amelioration includes the reduction of neuron loss.

[0567] Animal: As used herein, the term “animal” refers to any member of the animal kingdom. In some embodiments, “animal” refers to humans at any stage of development. In some embodiments, “animal” refers to non-human animals at any stage of development. In certain embodiments, the non-human animal is a mammal (e.g., a rodent, a mouse, a rat, a rabbit, a monkey, a dog, a cat, a sheep, cattle, a primate, or a pig). In some embodiments, animals include, but are not limited to, mammals, birds, reptiles, amphibians, fish, and worms. In some embodiments, the animal is a transgenic animal, genetically-engineered animal, or a clone.

[0568] Antisense strand: As used herein, the term “the antisense strand” or “the first strand” or “the guide strand” of a siRNA molecule refers to a strand that is substantially complementary to a section of about 10-50 nucleotides, e.g., about 15-30, 16-25, 18-23 or 19-22 nucleotides of the mRNA of the gene targeted for silencing. The antisense strand or first strand has sequence sufficiently complementary to the desired target mRNA sequence to direct target-specific silencing, e.g., complementarity sufficient to trigger the destruction of the desired target mRNA by the RNAi machinery or process.

[0569] Approximately: As used herein, the term “approximately” or “about,” as applied to one or more values of interest, refers to a value that is similar to a stated reference value. In certain embodiments, the term “approximately” or “about” refers to a range of values that fall within 25%, 20%, 19%, 18%, 17%, 16%, 15%, 14%, 13%, 12%, 11%, 10%, 9%, 8%, 7%, 6%, 5%, 4%, 3%, 2%, 1%, or less in either direction (greater than or less than) of the stated reference value unless otherwise stated or otherwise evident from the context (except where such number would exceed 100% of a possible value).

[0570] Associated with: As used herein, the terms “associated with,” “conjugated,” “linked,” “attached,” and “tethered,” when used with respect to two or more moieties, mean that the moieties are physically associated or connected with one another, either directly or via one or more additional moieties that serve as linking agents, to form a structure that is sufficiently stable so that the moieties remain physically associated under the conditions in which the structure is used, e.g., physiological conditions. An “association” need not be strictly through direct covalent chemical bonding. It may also suggest ionic or hydrogen bonding or a hybridization based connectivity sufficiently stable such that the “associated” entities remain physically associated.

[0571] Biomolecule: As used herein, the term “biomolecule” is any natural molecule which is amino acid-based, nucleic acid-based, carbohydrate-based or lipid-based, and the like.

[0572] Biologically active: As used herein, the phrase “biologically active” refers to a characteristic of any substance that has activity in or on a biological system and/or organism. For instance, a substance that, when administered to an organism, has a biological effect on that organism, is considered to be biologically active. In particular embodiments, a compounds and/or compositions of the present invention may be considered biologically active if even a portion of is biologically active or mimics an activity considered to biologically relevant.

[0573] Biological system: As used herein, the term “biological system” refers to a group of organs, tissues, cells, intracellular components, proteins, nucleic acids, molecules (including, but not limited to biomolecules) that function together to perform a certain biological task within cellular membranes, cellular compartments, cells, tissues, organs, organ systems, multicellular organisms, or any biological entity. In some embodiments, biological systems are cell signaling pathways comprising intracellular and/or extracellular cell signaling biomolecules. In some embodiments, biological systems comprise growth factor signaling events within the extracellular/cellular matrix and/or cellular niches.

[0574] Complementary and substantially complementary: As used herein, the term “complementary” refers to the ability of polynucleotides to form base pairs with one another. Base pairs are typically formed by hydrogen bonds between nucleotide units in antiparallel polynucleotide strands. Complementary polynucleotide strands can form base pair in the Watson-Crick manner (e.g., A to T, A to U, C to G), or in any other manner that allows for the formation of duplexes. As persons skilled in the art are aware, when using RNA as opposed to DNA, uracil rather than thymine is the base that is considered to be complementary to adenosine. However, when a U is denoted in the context of the present invention, the ability to substitute a T is implied, unless otherwise stated. Perfect complementarity or 100% complementarity refers to the situation in which each nucleotide unit of one polynucleotide strand can form hydrogen bond with a nucleotide unit of a second polynucleotide strand. Less than perfect complementarity refers to the situation in which some, but not all, nucleotide units of two strands can form hydrogen bond with each other. For example, for two 20-mers, if only two base pairs on each strand can form hydrogen bond with each other, the polynucleotide strands exhibit 10% complementarity. In the same example, if 18 base pairs on each strand can form hydrogen bonds with each other, the polynucleotide strands exhibit 90% complementarity. As used herein, the term “substantially complementary” means that the siRNA has a sequence (e.g., in the antisense strand) which is sufficient to bind the desired target mRNA, and to trigger the RNA silencing of the target mRNA.

[0575] Compound: As used herein, the term “compound” refers to a distinct chemical entity. In some embodiments, a particular compound may exist in one or more isomeric or isotopic forms (including, but not limited to stereoisomers, geometric isomers and isotopes). In some embodiments, a compound is provided or utilized in only a single such form. In some embodiments, a compound is provided or utilized as a mixture of two or more such forms (including, but not limited to a racemic mixture of stereoisomers). Those of skill in the art appreciate that some compounds exist in different such forms, show different properties and/or activities (including, but not limited to biological activities). In such cases it is within the ordinary skill of those in the art to select or avoid particular forms of the compound for use in accordance with the present invention. For example, compounds that contain asymmetrically substituted carbon atoms can be isolated in optically active or racemic forms. Methods on how to prepare optically active forms from optically active starting materials are known in the art, such as by resolution of racemic mixtures or by stereoselective synthesis.

[0576] Conserved: As used herein, the term “conserved” refers to nucleotides or amino acid residues of polynucleotide or polypeptide sequences, respectively, that are those that occur unaltered in the same position of two or more sequences being compared. Nucleotides or amino acids that are relatively conserved are those that are conserved among more related sequences than nucleotides or amino acids appearing elsewhere in the sequences.

[0577] In some embodiments, two or more sequences are said to be “completely conserved” if they are 100% identical to one another. In some embodiments, two or more sequences are said to be “highly conserved” if they are at least 70% identical, at least 80% identical, at least 90% identical, or at least 95% identical to one another. In some embodiments, two or more sequences are said to be “highly conserved” if they are about 70% identical, about 80% identical, about 90% identical, about 95%, about 98%, or about 99% identical to one another. In some embodiments, two or more sequences are said to be “conserved” if they are at least 30% identical, at least 40% identical, at least 50% identical, at least 60% identical, at least 70% identical, at least 80% identical, at least 90% identical, or at least 95% identical to one another. In some embodiments, two or more sequences are said to be “conserved” if they are about 30% identical, about 40% identical, about 50% identical, about 60% identical, about 70% identical, about 80% identical, about 90% identical, about 95% identical, about 98% identical, or about 99% identical to one another. Conservation of sequence may apply to the entire length of an oligonucleotide or polypeptide or may apply to a portion, region or feature thereof.

[0578] In one embodiment, conserved sequences are not contiguous. Those skilled in the art are able to appreciate how to achieve alignment when gaps in contiguous alignment are present between sequences, and to align corresponding residues not withstanding insertions or deletions present.

[0579] Delivery: As used herein, “delivery” refers to the act or manner of delivering compounds, substances, entities, moieties, cargoes or payloads to a target. Such target may be a cell, tissue, organ, organism, or system (whether biological or production).

[0580] Delivery Agent: As used herein, “delivery agent” refers to any agent which facilitates, at least in part, the delivery of one or more substances (including, but not limited to a compounds and/or compositions of the present invention, e.g., viral particles or expression vectors) to targeted cells.

[0581] Destabilized: As used herein, the term “destable,” “destabilize,” or “destabilizing region” means a region or molecule that is less stable than a starting, reference, wild-type or native form of the same region or molecule.

[0582] Detectable label: As used herein, “detectable label” refers to one or more markers, signals, or moieties which are attached, incorporated or associated with another entity, which markers, signals or moieties are readily detected by methods known in the art including radiography, fluorescence, chemiluminescence, enzymatic activity, absorbance, immunological detection and the like. Detectable labels may include radioisotopes, fluorophores, chromophores, enzymes, dyes, metal ions, ligands, biotin, avidin, streptavidin and haptens, quantum dots, polyhistidine tags, myc tags, flag tags, human influenza hemagglutinin (HA) tags and the like. Detectable labels may be located at any position in the entity with which they are attached, incorporated or associated. For example, when attached, incorporated in or associated with a peptide or protein, they may be within the amino acids, the peptides, or proteins, or located at the N- or C- termini.

[0583] Effective amount: As used herein, the term “effective amount” of an agent is that amount sufficient to effect beneficial or desired results, for example, upon single or multiple dose administration to a subject cell, in curing, alleviating, relieving or improving one or more symptoms of a disorder and, as such, an “effective amount” depends upon the context in which it is being applied. For example, in the context of administering an agent that treats ALS, an effective amount of an agent is, for example, an amount sufficient to achieve treatment, as defined herein, of ALS, as compared to the response obtained without administration of the agent.

[0584] Engineered: As used herein, embodiments of the invention are “engineered” when they are designed to have a feature or property, whether structural or chemical, that varies from a starting point, wild-type or native molecule. Thus, engineered agents or entities are those whose design and/or production include an act of the hand of man.

[0585] Epitope: As used herein, an “epitope” refers to a surface or region on a molecule that is capable of interacting with a biomolecule. For example a protein may contain one or more amino acids, e.g., an epitope, which interacts with an antibody, e.g., a biomolecule. In some embodiments, when referring to a protein or protein module, an epitope may comprise a linear stretch of amino acids or a three dimensional structure formed by folded amino acid chains.

[0586] Expression: As used herein, “expression” of a nucleic acid sequence refers to one or more of the following events: (1) production of an RNA template from a DNA sequence (e.g., by transcription); (2) processing of an RNA transcript (e.g., by splicing, editing, 5′ cap formation, and/or 3′ end processing); (3) translation of an RNA into a polypeptide or protein; (4) folding of a polypeptide or protein; and (5) post-translational modification of a polypeptide or protein.

[0587] Feature: As used herein, a “feature” refers to a characteristic, a property, or a distinctive element.

[0588] Formulation: As used herein, a “formulation” includes at least a compound and/or composition of the present invention and a delivery agent.

[0589] Fragment: A “fragment,” as used herein, refers to a contiguous portion of a whole. For example, fragments of proteins may comprise polypeptides obtained by digesting full-length protein isolated from cultured cells. In some embodiments, a fragment of a protein includes at least 3, 4, 5, 6, 7, 8, 9, 10, 11, 12, 13, 14, 15, 16, 17, 18, 19, 20, 25, 30, 35, 40, 45, 50, 55, 60, 65, 70, 75, 80, 85, 90, 95, 100, 150, 200, 250 or more amino acids. In some embodiments, fragments of an antibody include portions of an antibody subjected to enzymatic digestion or synthesized as such.

[0590] Functional: As used herein, a “functional” biological molecule is a biological entity with a structure and in a form in which it exhibits a property and/or activity by which it is characterized.

[0591] Fusion protein: As used herein, a “fusion protein” or “chimeric protein” is a protein created through the combination of two or more genes encoding separate proteins. Translation of this fusion gene results in one or more polypeptides with functional properties derived from each of the original proteins. In some embodiments, the fusion protein or chimeric protein can be engineered to include the full sequence of both original proteins. In other embodiments, the fusion protein or chimeric protein includes a part, such as a functional part or domain, from each of the proteins. Various spatial arrangements of the domains may be envisioned according to the present invention. It is contemplated as part of the current invention that the domains may be N-terminal, C-terminal, or interspersed with respect to each other in various orientations. In some embodiments, the fusion proteins may comprise multiple copies of a particular domain. The various domains of the fusion proteins may be connected to each other by linkers. In some embodiments, the domains may be encoded on separate polynucleotides. In some embodiments, they may be encoded on the same polynucleotide. In some embodiments, the various domains may be on the same polypeptide. In other embodiments, the domains may be on separate polypeptides. It is also understood that the fusion proteins or proteins of the present invention may be codon optimized for expression in the system of interest according to methods known in the art.

[0592] Gene expression: The term “gene expression” refers to the process by which a nucleic acid sequence undergoes successful transcription and in most instances translation to produce a protein or peptide. For clarity, when reference is made to measurement of “gene expression”, this should be understood to mean that measurements may be of the nucleic acid product of transcription, e.g., RNA or mRNA or of the amino acid product of translation, e.g., polypeptides or peptides. Methods of measuring the amount or levels of RNA, mRNA, polypeptides and peptides are well known in the art.

[0593] Homology: As used herein, the term “homology” refers to the overall relatedness between polymeric molecules, e.g. between nucleic acid molecules (e.g. DNA molecules and/or RNA molecules) and/or between polypeptide molecules. In some embodiments, polymeric molecules are considered to be “homologous” to one another if their sequences are at least 25%, 30%, 35%, 40%, 45%, 50%, 55%, 60%, 65%, 70%, 75%, 80%, 85%, 90%, 95%, or 99% identical or similar. The term “homologous” necessarily refers to a comparison between at least two sequences (polynucleotide or polypeptide sequences). In accordance with the invention, two polynucleotide sequences are considered to be homologous if the polypeptides they encode are at least about 50%, 60%, 70%, 80%, 90%, 95%, or even 99% for at least one stretch of at least about 20 amino acids. In some embodiments, homologous polynucleotide sequences are characterized by the ability to encode a stretch of at least 4-5 uniquely specified amino acids. For polynucleotide sequences less than 60 nucleotides in length, homology is typically determined by the ability to encode a stretch of at least 4-5 uniquely specified amino acids. In accordance with the invention, two protein sequences are considered to be homologous if the proteins are at least about 50%, 60%, 70%, 80%, or 90% identical for at least one stretch of at least about 20 amino acids. In many embodiments, homologous protein may show a large overall degree of homology and a high degree of homology over at least one short stretch of at least 3, 4, 5, 6, 7, 8, 9, 10, 11, 12, 13, 14, 15, 16, 17, 18, 19, 20, 25, 30, 35, 40, 45, 50 or more amino acids. In many embodiments, homologous proteins share one or more characteristic sequence elements. As used herein, the term “characteristic sequence element” refers to a motif present in related proteins. In some embodiments, the presence of such motifs correlates with a particular activity (such as biological activity).

[0594] Identity: As used herein, the term “identity” refers to the overall relatedness between polymeric molecules, e.g., between oligonucleotide molecules (e.g. DNA molecules and/or RNA molecules) and/or between polypeptide molecules. Calculation of the percent identity of two polynucleotide sequences, for example, may be performed by aligning the two sequences for optimal comparison purposes (e.g., gaps can be introduced in one or both of a first and a second nucleic acid sequences for optimal alignment and non-identical sequences can be disregarded for comparison purposes). In certain embodiments, the length of a sequence aligned for comparison purposes is at least 30%, at least 40%, at least 50%, at least 60%, at least 70%, at least 80%, at least 90%, at least 95%, or 100% of the length of the reference sequence. The nucleotides at corresponding nucleotide positions are then compared. When a position in the first sequence is occupied by the same nucleotide as the corresponding position in the second sequence, then the molecules are identical at that position. The percent identity between the two sequences is a function of the number of identical positions shared by the sequences, taking into account the number of gaps, and the length of each gap, which needs to be introduced for optimal alignment of the two sequences. The comparison of sequences and determination of percent identity between two sequences can be accomplished using a mathematical algorithm. For example, the percent identity between two nucleotide sequences can be determined using methods such as those described in Computational Molecular Biology, Lesk, A. M., ed., Oxford University Press, New York, 1988; Biocomputing: Informatics and Genome Projects, Smith, D. W., ed., Academic Press, New York, 1993; Sequence Analysis in Molecular Biology, von Heinje, G., Academic Press, 1987; Computer Analysis of Sequence Data, Part I, Griffin, A. M., and Griffin, H. G., eds., Humana Press, New Jersey, 1994; and Sequence Analysis Primer, Gribskov, M. and Devereux, J., eds., M Stockton Press, New York, 1991; each of which is incorporated herein by reference. For example, the percent identity between two nucleotide sequences can be determined, for example using the algorithm of Meyers and Miller (CABIOS, 1989, 4:11-17), which has been incorporated into the ALIGN program (version 2.0) using a PAM120 weight residue table, a gap length penalty of 12 and a gap penalty of 4. The percent identity between two nucleotide sequences can, alternatively, be determined using the GAP program in the GCG software package using an NWSgapdna.CMP matrix. Methods commonly employed to determine percent identity between sequences include, but are not limited to those disclosed in Carillo, H., and Lipman, D., SIAM J Applied Math., 48:1073 (1988); incorporated herein by reference. Techniques for determining identity are codified in publicly available computer programs. Computer software to determine homology between two sequences include, but are not limited to, GCG program package, Devereux, J., et al., Nucleic Acids Research, 12(1), 387 (1984)), BLASTP, BLASTN, and FASTA Altschul, S. F. et al., J. Molec. Biol., 215, 403 (1990)).

[0595] Inhibit expression of a gene: As used herein, the phrase “inhibit expression of a gene” means to cause a reduction in the amount of an expression product of the gene. The expression product may be RNA transcribed from the gene (e.g. mRNA) or a polypeptide translated from mRNA transcribed from the gene. Typically a reduction in the level of mRNA results in a reduction in the level of a polypeptide translated therefrom. The level of expression may be determined using standard techniques for measuring mRNA or protein.

[0596] In vitro: As used herein, the term “in vitro” refers to events that occur in an artificial environment, e.g., in a test tube or reaction vessel, in cell culture, in a Petri dish, etc., rather than within an organism (e.g., animal, plant, or microbe).

[0597] In vivo: As used herein, the term “in vivo” refers to events that occur within an organism (e.g., animal, plant, or microbe or cell or tissue thereof).

[0598] Isolated: As used herein, the term “isolated” is synonymous with “separated”, but carries with it the inference separation was carried out by the hand of man. In one embodiment, an isolated substance or entity is one that has been separated from at least some of the components with which it was previously associated (whether in nature or in an experimental setting). Isolated substances may have varying levels of purity in reference to the substances from which they have been associated. Isolated substances and/or entities may be separated from at least about 10%, about 20%, about 30%, about 40%, about 50%, about 60%, about 70%, about 80%, about 90%, or more of the other components with which they were initially associated. In some embodiments, isolated agents are more than about 80%, about 85%, about 90%, about 91%, about 92%, about 93%, about 94%, about 95%, about 96%, about 97%, about 98%, about 99%, or more than about 99% pure. As used herein, a substance is “pure” if it is substantially free of other components.

[0599] Substantially isolated: By “substantially isolated” is meant that the compound is substantially separated from the environment in which it was formed or detected. Partial separation can include, for example, a composition enriched in the compound of the present disclosure. Substantial separation can include compositions containing at least about 50%, at least about 60%, at least about 70%, at least about 80%, at least about 90%, at least about 95%, at least about 97%, or at least about 99% by weight of the compound of the present disclosure, or salt thereof. Methods for isolating compounds and their salts are routine in the art. In some embodiments, isolation of a substance or entity includes disruption of chemical associations and/or bonds. In some embodiments, isolation includes only the separation from components with which the isolated substance or entity was previously combined and does not include such disruption.

[0600] Ligand: As used herein, a “ligand” or “chemical agent” is a substance that forms a complex with a protein or fusion protein. Typically, binding is reversible. Ligand binding to a protein often leads to a conformational change in the protein which typically alters the functional state of the protein. In a non-limiting example, ligands may be activators or inhibitors. In other non-limiting examples, a ligand or chemical agent may be a small molecule, ion or protein.

[0601] Modified: As used herein, the term “modified” refers to a changed state or structure of a molecule or entity as compared with a parent or reference molecule or entity. Molecules may be modified in many ways including chemically, structurally, and functionally. In some embodiments, compounds and/or compositions of the present invention are modified by the introduction of non-natural amino acids, or non-natural nucleotides.

[0602] Mutation: As used herein, the term “mutation” refers to a change and/or alteration. In some embodiments, mutations may be changes and/or alterations to proteins (including peptides and polypeptides) and/or nucleic acids (including polynucleic acids). In some embodiments, mutations comprise changes and/or alterations to a protein and/or nucleic acid sequence. Such changes and/or alterations may comprise the addition, substitution and or deletion of one or more amino acids (in the case of proteins and/or peptides) and/or nucleotides (in the case of nucleic acids and or polynucleic acids). In embodiments wherein mutations comprise the addition and/or substitution of amino acids and/or nucleotides, such additions and/or substitutions may comprise one or more amino acid and/or nucleotide residues and may include modified amino acids and/or nucleotides.

[0603] Naturally occurring: As used herein, “naturally occurring” means existing in nature without artificial aid, or involvement of the hand of man.

[0604] Non-human vertebrate: As used herein, a “non-human vertebrate” includes all vertebrates except Homo sapiens, including wild and domesticated species. Examples of non-human vertebrates include, but are not limited to, mammals, such as alpaca, banteng, bison, camel, cat, cattle, deer, dog, donkey, gayal, goat, guinea pig, horse, llama, mule, pig, rabbit, reindeer, sheep water buffalo, and yak.

[0605] Nucleic acid: As used herein, the term “nucleic acid”, “polynucleotide” and “oligonucleotide” refer to any nucleic acid polymers composed of either polydeoxyribonucleotides (containing 2-deoxy-D-ribose), or polyribonucleotides (containing D-ribose), or any other type of polynucleotide which is an N glycoside of a purine or pyrimidine base, or modified purine or pyrimidine bases. There is no intended distinction in length between the term “nucleic acid”, “polynucleotide” and “oligonucleotide”, and these terms will be used interchangeably. These terms refer only to the primary structure of the molecule. Thus, these terms include double- and single-stranded DNA, as well as double- and single stranded RNA.

[0606] Off-target: As used herein, “off target” refers to any unintended effect on any one or more target, gene and/or cellular transcript.

[0607] Operably linked: As used herein, the phrase “operably linked” refers to a functional connection between two or more molecules, constructs, transcripts, entities, moieties or the like.

[0608] Particle: As used herein, a “particle” is a virus comprised of at least two components, a protein capsid and a polynucleotide sequence enclosed within the capsid.

[0609] Patient: As used herein, “patient” refers to a subject who may seek or be in need of treatment, requires treatment, is receiving treatment, will receive treatment, or a subject who is under care by a trained (e.g., licensed) professional for a particular disease or condition.

[0610] Payload: As used herein, “payload” refers to one or more polynucleotides or polynucleotide regions encoded by or within a viral genome or an expression product of such polynucleotide or polynucleotide region, e.g., a transgene, a polynucleotide encoding a polypeptide or multi-polypeptide or a modulatory nucleic acid or regulatory nucleic acid. Where regulatable elements are encoded or the payload is regulated by regulatable elements, the payload may also be referred to as a “regulatable-AAV payload.” Where CRISPR regulatable elements are encoded or the payload is regulated by a CRISPR regulatable element, the payload may also be referred to as a “CRISPR-AAV payload.”

[0611] Payload construct: As used herein, “payload construct” is one or more polynucleotide regions encoding or comprising a payload that is flanked on one or both sides by an inverted terminal repeat (ITR) sequence. The payload construct is a template that is replicated in a viral production cell to produce a viral genome. Where regulatable elements are encoded or the payload is regulated by a regulatable element, the payload construct may also be referred to as a “regulatable-AAV payload construct.” Where CRISPR regulatable elements are encoded or the payload is regulated by a CRISPR regulatable element, the payload construct may also be referred to as a “CRISPR-AAV payload construct.” In addition to the sequence encoding the payload, the payload construct may also comprise 5′ and 3′ untranslated regions (UTRs) and may also include the promoter. Payload construct vector: As used herein, “payload construct vector” is a vector encoding or comprising a payload construct, and regulatory regions for replication and expression in bacterial cells.

[0612] Payload construct expression vector: As used herein, a “payload construct expression vector” is a vector encoding or comprising a payload construct and which further comprises one or more polynucleotide regions encoding or comprising components for viral expression in a viral replication cell.

[0613] Peptide: As used herein, the term “peptide” refers to a chain of amino acids that is less than or equal to about 50 amino acids long, e.g., about 5, 10, 15, 20, 25, 30, 35, 40, 45, or 50 amino acids long.

[0614] Pharmaceutically acceptable: The phrase “pharmaceutically acceptable” is employed herein to refer to those compounds, materials, compositions, and/or dosage forms which are, within the scope of sound medical judgment, suitable for use in contact with the tissues of human beings and animals without excessive toxicity, irritation, allergic response, or other problem or complication, commensurate with a reasonable benefit/risk ratio.

[0615] Pharmaceutically acceptable excipients: As used herein, the term “pharmaceutically acceptable excipient,” as used herein, refers to any ingredient other than active agents (e.g., as described herein) present in pharmaceutical compositions and having the properties of being substantially nontoxic and non-inflammatory in subjects. In some embodiments, pharmaceutically acceptable excipients are vehicles capable of suspending and/or dissolving active agents. Excipients may include, for example: antiadherents, antioxidants, binders, coatings, compression aids, disintegrants, dyes (colors), emollients, emulsifiers, fillers (diluents), film formers or coatings, flavors, fragrances, glidants (flow enhancers), lubricants, preservatives, printing inks, sorbents, suspending or dispersing agents, sweeteners, and waters of hydration. Excipients include, but are not limited to: butylated hydroxytoluene (BHT), calcium carbonate, calcium phosphate (dibasic), calcium stearate, croscarmellose, cross-linked polyvinyl pyrrolidone, citric acid, crospovidone, cysteine, ethylcellulose, gelatin, hydroxypropyl cellulose, hydroxypropyl methylcellulose, lactose, magnesium stearate, maltitol, mannitol, methionine, methylcellulose, methyl paraben, microcrystalline cellulose, polyethylene glycol, polyvinyl pyrrolidone, povidone, pregelatinized starch, propyl paraben, retinyl palmitate, shellac, silicon dioxide, sodium carboxymethyl cellulose, sodium citrate, sodium starch glycolate, sorbitol, starch (corn), stearic acid, sucrose, talc, titanium dioxide, vitamin A, vitamin E, vitamin C, and xylitol.

[0616] Pharmaceutically acceptable salts: Pharmaceutically acceptable salts of the compounds described herein are forms of the disclosed compounds wherein the acid or base moiety is in its salt form (e.g., as generated by reacting a free base group with a suitable organic acid). Examples of pharmaceutically acceptable salts include, but are not limited to, mineral or organic acid salts of basic residues such as amines; alkali or organic salts of acidic residues such as carboxylic acids; and the like. Representative acid addition salts include acetate, adipate, alginate, ascorbate, aspartate, benzenesulfonate, benzoate, bisulfate, borate, butyrate, camphorate, camphorsulfonate, citrate, cyclopentanepropionate, digluconate, dodecylsulfate, ethanesulfonate, fumarate, glucoheptonate, glycerophosphate, hemisulfate, heptonate, hexanoate, hydrobromide, hydrochloride, hydroiodide, 2-hydroxy-ethanesulfonate, lactobionate, lactate, laurate, lauryl sulfate, malate, maleate, malonate, methanesulfonate, 2-naphthalenesulfonate, nicotinate, nitrate, oleate, oxalate, palmitate, pamoate, pectinate, persulfate, 3-phenylpropionate, phosphate, picrate, pivalate, propionate, stearate, succinate, sulfate, tartrate, thiocyanate, toluenesulfonate, undecanoate, valerate salts, and the like. Representative alkali or alkaline earth metal salts include sodium, lithium, potassium, calcium, magnesium, and the like, as well as nontoxic ammonium, quaternary ammonium, and amine cations, including, but not limited to ammonium, tetramethylammonium, tetraethylammonium, methylamine, dimethylamine, trimethylamine, triethylamine, ethylamine, and the like. Pharmaceutically acceptable salts include the conventional non-toxic salts, for example, from non-toxic inorganic or organic acids. In some embodiments a pharmaceutically acceptable salt is prepared from a parent compound which contains a basic or acidic moiety by conventional chemical methods. Generally, such salts can be prepared by reacting the free acid or base forms of these compounds with a stoichiometric amount of the appropriate base or acid in water or in an organic solvent, or in a mixture of the two; generally, nonaqueous media like ether, ethyl acetate, ethanol, isopropanol, or acetonitrile are preferred. Lists of suitable salts are found in Remington's Pharmaceutical Sciences, 17^{th} ed., Mack Publishing Company, Easton, Pa., 1985, p. 1418, Pharmaceutical Salts: Properties, Selection, and Use, P. H. Stahl and C. G. Wermuth (eds.), Wiley-VCH, 2008, and Berge et al., Journal of Pharmaceutical Science, 66, 1-19 (1977), each of which is incorporated herein by reference in its entirety. Pharmaceutically acceptable solvate: The term “pharmaceutically acceptable solvate,” as used herein, refers to a crystalline form of a compound wherein molecules of a suitable solvent are incorporated in the crystal lattice. For example, solvates may be prepared by crystallization, recrystallization, or precipitation from a solution that includes organic solvents, water, or a mixture thereof. Examples of suitable solvents are ethanol, water (for example, mono-, di-, and tri-hydrates), N-methylpyrrolidinone (NMP), dimethyl sulfoxide (DMSO), N,N′-dimethylformamide (DMF), N,N′-dimethylacetamide (DMAC), 1,3-dimethyl-2-imidazolidinone (DMEU), 1,3-dimethyl-3,4,5,6-tetrahydro-2-(1H)-pyrimidinone (DMPU), acetonitrile (ACN), propylene glycol, ethyl acetate, benzyl alcohol, 2-pyrrolidone, benzyl benzoate, and the like. When water is the solvent, the solvate is referred to as a “hydrate.” In some embodiments, the solvent incorporated into a solvate is of a type or at a level that is physiologically tolerable to an organism to which the solvate is administered (e.g., in a unit dosage form of a pharmaceutical composition).

[0617] Pharmacokinetic: As used herein, “pharmacokinetic” refers to any one or more properties of a molecule or compound as it relates to the determination of the fate of substances administered to living organisms. Pharmacokinetics are divided into several areas including the extent and rate of absorption, distribution, metabolism and excretion. This is commonly referred to as ADME where: (A) Absorption is the process of a substance entering the blood circulation; (D) Distribution is the dispersion or dissemination of substances throughout the fluids and tissues of the body; (M) Metabolism (or Biotransformation) is the irreversible transformation of parent compounds into daughter metabolites; and (E) Excretion (or Elimination) refers to the elimination of the substances from the body. In rare cases, some drugs irreversibly accumulate in body tissue.

[0618] Physicochemical: As used herein, “physicochemical” means of or relating to a physical and/or chemical property.

[0619] Preventing: As used herein, the term “preventing” refers to partially or completely delaying onset of an infection, disease, disorder and/or condition; partially or completely delaying onset of one or more symptoms, features, or clinical manifestations of a particular infection, disease, disorder, and/or condition; partially or completely delaying onset of one or more symptoms, features, or manifestations of a particular infection, disease, disorder, and/or condition; partially or completely delaying progression from an infection, a particular disease, disorder and/or condition; and/or decreasing the risk of developing pathology associated with the infection, the disease, disorder, and/or condition.

[0620] Proliferate: As used herein, the term “proliferate” means to grow, expand, replicate or increase or cause to grow, expand, replicate or increase. “Proliferative” means having the ability to proliferate. “Anti-proliferative” means having properties counter to or in opposition to proliferative properties.

[0621] Promoter: As used herein, the term “promoter” is a nucleotide sequence that permits binding of RNA polymerase and directs the transcription of a gene. A promoter is typically proximal to the transcriptional start site of the gene. A promoter can be inducible, repressible, constitutive, ubiquitous, tissue specific and/or synthetic (may be composed of sequences derived from different sources). The promoter may be located 5′ of the transcription start site of the payload, contained within the payload construct and may drives expression of the payload. The promoter may be located 5′ of the transcription start site of the regulatable element, and may drive the expression of the regulatable element. The size of the promoter can vary. Due to the limited packaging capacity of AAV, it is desirable to have a promoter as short as possible, while still able to provide the desired expression levels and regulation.

[0622] A synthetic promoter may be composed of sequences, such as various transcriptional elements, which are derived from different sources. A synthetic promoter may include regulatable elements, which are binding sites for transactivator or repressor fusion proteins. These fusion proteins may be components of regulatable elements. A synthetic promoter may contain transcriptional enhancer sequences. As used herein, the term “enhancer” refers to a regulatory region or element, which functions to enhance transcription. Non-limiting examples of enhancers include the CMV enhancer or portions thereof, or the UBC enhancer or portions thereof.

[0623] Protein of interest: As used herein, the terms “proteins of interest” or “desired proteins” include those provided herein and fragments, mutants, variants, and alterations thereof

[0624] Purified: As used herein, the term “purify” means to make substantially pure or clear from unwanted components, material defilement, admixture or imperfection. “Purified” refers to the state of being pure. “Purification” refers to the process of making pure.

[0625] Region: As used herein, the term “region” refers to a zone or general area. In some embodiments, when referring to a protein or protein module, a region may comprise a linear sequence of amino acids along the protein or protein module or may comprise a three dimensional area, an epitope and/or a cluster of epitopes. In some embodiments, regions comprise terminal regions. As used herein, the term “terminal region” refers to regions located at the ends or termini of a given agent. When referring to proteins, terminal regions may comprise N- and/or C-termini. N-termini refer to the end of a protein comprising an amino acid with a free amino group. C-termini refer to the end of a protein comprising an amino acid with a free carboxyl group. N- and/or C-terminal regions may there for comprise the N- and/or C-termini as well as surrounding amino acids. In some embodiments, N- and/or C-terminal regions comprise from about 3 amino acid to about 30 amino acids, from about 5 amino acids to about 40 amino acids, from about 10 amino acids to about 50 amino acids, from about 20 amino acids to about 100 amino acids and/or at least 100 amino acids. In some embodiments, N-terminal regions may comprise any length of amino acids that includes the N-terminus, but does not include the C-terminus. In some embodiments, C-terminal regions may comprise any length of amino acids, which include the C-terminus, but do not comprise the N-terminus.

[0626] In some embodiments, when referring to a polynucleotide, a region may comprise a linear sequence of nucleic acids along the polynucleotide or may comprise a three dimensional area, secondary structure, or tertiary structure. In some embodiments, regions comprise terminal regions. As used herein, the term “terminal region” refers to regions located at the ends or termini of a given agent. When referring to polynucleotides, terminal regions may comprise 5′ and 3′ termini. 5′ termini refer to the end of a polynucleotide comprising a nucleic acid with a free phosphate group. 3′ termini refer to the end of a polynucleotide comprising a nucleic acid with a free hydroxyl group. 5′ and 3′ regions may there for comprise the 5′ and 3′ termini as well as surrounding nucleic acids. In some embodiments, 5′ and 3′ terminal regions comprise from about 9 nucleic acids to about 90 nucleic acids, from about 15 nucleic acids to about 120 nucleic acids, from about 30 nucleic acids to about 150 nucleic acids, from about 60 nucleic acids to about 300 nucleic acids and/or at least 300 nucleic acids. In some embodiments, 5′ regions may comprise any length of nucleic acids that includes the 5′ terminus, but does not include the 3′ terminus. In some embodiments, 3′ regions may comprise any length of nucleic acids, which include the 3′ terminus, but does not comprise the 5′ terminus.

[0627] Regulatable AAV Particle or Regulatable AAV Particle: As used herein, the term “regulatable-AAV particle” is an AAV particle which comprises a capsid, a polynucleotide, and one or more regulatable elements and/or a payload which is regulated by one or more regulatable elements. Where CRISPR regulatable elements are present, the AAV particle may be referred to as a “Regulatable CRISPR-AAV particle”.

[0628] Regulatable Elements: As used herein, the term “regulatable element” refers to one or more components, factors, polynucleotide features or motifs which imparts regulatable or tunable features to regulate the expression of a payload. The expression of the regulatable elements may also be further regulated.

[0629] RNA or RNA molecule: As used herein, the term “RNA” or “RNA molecule” or “ribonucleic acid molecule” refers to a polymer of ribonucleotides; the term “DNA” or “DNA molecule” or “deoxyribonucleic acid molecule” refers to a polymer of deoxyribonucleotides. DNA and RNA can be synthesized naturally, e.g., by DNA replication and transcription of DNA, respectively; or be chemically synthesized. DNA and RNA can be single-stranded (i.e., ssRNA or ssDNA, respectively) or multi-stranded (e.g., double stranded, i.e., dsRNA and dsDNA, respectively). The term “mRNA” or “messenger RNA”, as used herein, refers to a single stranded RNA that encodes the amino acid sequence of one or more polypeptide chains.

[0630] RNA interference: As used herein, the term “RNA interference” or “RNAi” refers to a sequence specific regulatory mechanism mediated by RNA molecules which results in the inhibition or interference or “silencing” of the expression of a corresponding protein-coding gene.

[0631] Sample: As used herein, the term “sample” refers to an aliquot or portion taken from a source and/or provided for analysis or processing. In some embodiments, a sample is from a biological source such as a tissue, cell or component part (e.g. a body fluid, including but not limited to blood, mucus, lymphatic fluid, synovial fluid, cerebrospinal fluid, saliva, amniotic fluid, amniotic cord blood, urine, vaginal fluid and semen). In some embodiments, a sample may be or comprise a homogenate, lysate or extract prepared from a whole organism or a subset of its tissues, cells or component parts, or a fraction or portion thereof, including but not limited to, for example, plasma, serum, spinal fluid, lymph fluid, the external sections of the skin, respiratory, intestinal, and genitourinary tracts, tears, saliva, milk, blood cells, tumors, organs. In some embodiments, a sample is or comprises a medium, such as a nutrient broth or gel, which may contain cellular components, such as proteins or nucleic acid molecule. In some embodiments, a “primary” sample is an aliquot of the source. In some embodiments, a primary sample is subjected to one or more processing (e.g., separation, purification, etc.) steps to prepare a sample for analysis or other use.

[0632] Self-complementary viral particle: As used herein, a “self-complementary viral particle” is a particle comprised of at least two components, a protein capsid and a polynucleotide sequence encoding a self-complementary genome enclosed within the capsid.

[0633] Sense strand: As used herein, the term “the sense strand” or “the second strand” or “the passenger strand” of a siRNA molecule refers to a strand that is complementary to the antisense strand or first strand. The antisense and sense strands of a siRNA molecule are hybridized to form a duplex structure. As used herein, a “siRNA duplex” includes a siRNA strand having sufficient complementarity to a section of about 10-50 nucleotides of the mRNA of the gene targeted for silencing and a siRNA strand having sufficient complementarity to form a duplex with the siRNA strand.

[0634] Signal Sequences: As used herein, the phrase “signal sequences” refers to a sequence which can direct the transport or localization.

[0635] Single unit dose: As used herein, a “single unit dose” is a dose of any therapeutic administered in one dose/at one time/single route/single point of contact, i.e., single administration event. In some embodiments, a single unit dose is provided as a discrete dosage form (e.g., a tablet, capsule, patch, loaded syringe, vial, etc.).

[0636] Similarity: As used herein, the term “similarity” refers to the overall relatedness between polymeric molecules, e.g. between polynucleotide molecules (e.g. DNA molecules and/or RNA molecules) and/or between polypeptide molecules. Calculation of percent similarity of polymeric molecules to one another can be performed in the same manner as a calculation of percent identity, except that calculation of percent similarity takes into account conservative substitutions as is understood in the art.

[0637] Small/short interfering RNA: As used herein, the term “small/short interfering RNA” or “siRNA” refers to an RNA molecule (or RNA analog) comprising between about 5-60 nucleotides (or nucleotide analogs) which is capable of directing or mediating RNAi. Preferably, a siRNA molecule comprises between about 15-30 nucleotides or nucleotide analogs, more preferably between about 16-25 nucleotides (or nucleotide analogs), even more preferably between about 18-23 nucleotides (or nucleotide analogs), and even more preferably between about 19-22 nucleotides (or nucleotide analogs) (e.g., 19, 20, 21 or 22 nucleotides or nucleotide analogs). The term “short” siRNA refers to a siRNA comprising 5-23 nucleotides, preferably 21 nucleotides (or nucleotide analogs), for example, 19, 20, 21 or 22 nucleotides. The term “long” siRNA refers to a siRNA comprising 24-60 nucleotides, preferably about 24-25 nucleotides, for example, 23, 24, 25 or 26 nucleotides. Short siRNAs may, in some instances, include fewer than 19 nucleotides, e.g., 16, 17 or 18 nucleotides, or as few as 5 nucleotides, provided that the shorter siRNA retains the ability to mediate RNAi. Likewise, long siRNAs may, in some instances, include more than 26 nucleotides, e.g., 27, 28, 29, 30, 35, 40, 45, 50, 55, or even 60 nucleotides, provided that the longer siRNA retains the ability to mediate RNAi or translational repression absent further processing, e.g., enzymatic processing, to a short siRNA. siRNAs can be single stranded RNA molecules (ss-siRNAs) or double stranded RNA molecules (ds-siRNAs) comprising a sense strand and an antisense strand which hybridized to form a duplex structure called siRNA duplex.

[0638] Split dose: As used herein, a “split dose” is the division of single unit dose or total daily dose into two or more doses.

[0639] Stable: As used herein “stable” refers to a compound or entity that is sufficiently robust to survive isolation to a useful degree of purity from a reaction mixture, and preferably capable of formulation into an efficacious therapeutic agent.

[0640] Stabilized: As used herein, the term “stabilize”, “stabilized,” “stabilized region” means to make or become stable. In some embodiments, stability is measured relative to an absolute value. In some embodiments, stability is measured relative to a reference compound or entity.

[0641] Subject: As used herein, the term “subject” or “patient” refers to any organism to which a composition in accordance with the invention may be administered, e.g., for experimental, diagnostic, prophylactic, and/or therapeutic purposes. Typical subjects include animals (e.g., mammals such as mice, rats, rabbits, non-human primates, and humans) and/or plants.

[0642] Substantially: As used herein, the term “substantially” refers to the qualitative condition of exhibiting total or near-total extent or degree of a characteristic or property of interest. One of ordinary skill in the biological arts will understand that biological and chemical phenomena rarely, if ever, go to completion and/or proceed to completeness or achieve or avoid an absolute result. The term “substantially” is therefore used herein to capture the potential lack of completeness inherent in many biological and chemical phenomena.

[0643] Substantially equal: As used herein as it relates to time differences between doses, the term means plus/minus 2%.

[0644] Substantially simultaneously: As used herein and as it relates to plurality of doses, the term typically means within about 2 seconds.

[0645] Suffering from: An individual who is “suffering from” a disease, disorder, and/or condition has been diagnosed with or displays one or more symptoms of a disease, disorder, and/or condition.

[0646] Susceptible to: An individual who is “susceptible to” a disease, disorder, and/or condition has not been diagnosed with and/or may not exhibit symptoms of the disease, disorder, and/or condition but harbors a propensity to develop a disease or its symptoms. In some embodiments, an individual who is susceptible to a disease, disorder, and/or condition (for example, cancer) may be characterized by one or more of the following: (1) a genetic mutation associated with development of the disease, disorder, and/or condition; (2) a genetic polymorphism associated with development of the disease, disorder, and/or condition; (3) increased and/or decreased expression and/or activity of a protein and/or nucleic acid associated with the disease, disorder, and/or condition; (4) habits and/or lifestyles associated with development of the disease, disorder, and/or condition; (5) a family history of the disease, disorder, and/or condition; and (6) exposure to and/or infection with a microbe associated with development of the disease, disorder, and/or condition. In some embodiments, an individual who is susceptible to a disease, disorder, and/or condition will develop the disease, disorder, and/or condition. In some embodiments, an individual who is susceptible to a disease, disorder, and/or condition will not develop the disease, disorder, and/or condition.

[0647] Synthetic: The term “synthetic” means produced, prepared, and/or manufactured by the hand of man. Synthesis of polynucleotides or polypeptides or other molecules of the present invention may be chemical or enzymatic.

[0648] Targeting: As used herein, “targeting” means the process of design and selection of nucleic acid sequence that will hybridize to a target nucleic acid and induce a desired effect.

[0649] Targeted Cells: As used herein, “targeted cells” refers to any one or more cells of interest. The cells may be found in vitro, in vivo, in situ or in the tissue or organ of an organism. The organism may be an animal, preferably a mammal, more preferably a human and most preferably a patient.

[0650] Therapeutic Agent: The term “therapeutic agent” refers to any agent that, when administered to a subject has a therapeutic, diagnostic, and/or prophylactic effect and/or elicits a desired biological and/or pharmacological effect.

[0651] Therapeutically effective amount: As used herein, the term “therapeutically effective amount” means an amount of an agent to be delivered (e.g., nucleic acid, drug, therapeutic agent, diagnostic agent, prophylactic agent, etc.) that is sufficient, when administered to a subject suffering from or susceptible to an infection, disease, disorder, and/or condition, to treat, improve symptoms of, diagnose, prevent, and/or delay the onset of the infection, disease, disorder, and/or condition. In some embodiments, a therapeutically effective amount is provided in a single dose. In some embodiments, a therapeutically effective amount is administered in a dosage regimen comprising a plurality of doses. Those skilled in the art will appreciate that in some embodiments, a unit dosage form may be considered to comprise a therapeutically effective amount of a particular agent or entity if it comprises an amount that is effective when administered as part of such a dosage regimen.

[0652] Therapeutically effective outcome: As used herein, the term “therapeutically effective outcome” means an outcome that is sufficient in a subject suffering from or susceptible to an infection, disease, disorder, and/or condition, to treat, improve symptoms of, diagnose, prevent, and/or delay the onset of the infection, disease, disorder, and/or condition.

[0653] Total daily dose: As used herein, a “total daily dose” is an amount given or prescribed in a 24 hour period. It may be administered as a single unit dose.

[0654] Treating: As used herein, the term “treating” refers to partially or completely alleviating, ameliorating, improving, relieving, delaying onset of, inhibiting progression of, reducing severity of, and/or reducing incidence of one or more symptoms or features of a particular infection, disease, disorder, and/or condition. For example, “treating” cancer may refer to inhibiting survival, growth, and/or spread of a tumor. Treatment may be administered to a subject who does not exhibit signs of a disease, disorder, and/or condition and/or to a subject who exhibits only early signs of a disease, disorder, and/or condition for the purpose of decreasing the risk of developing pathology associated with the disease, disorder, and/or condition.

[0655] Unmodified: As used herein, “unmodified” refers to any substance, compound or molecule prior to being changed in any way. Unmodified may, but does not always, refer to the wild-type or native form of a biomolecule or entity. Molecules or entities may undergo a series of modifications whereby each modified product may serve as the “unmodified” starting molecule or entity for a subsequent modification.

[0656] Untranslated regions: As used herein, “Untranslated regions” or UTRs refers to two polynucleotide sequences located on each side of a coding sequence. The polynucleotide sequence located on the 5′ side of the coding sequence is referred to as a 5′UTR and the polynucleotide sequence located on the 3′ side of the coding sequence is referred to as the 3′ UTR. As used herein, “payload 5′ UTR” and “payload 3′ UTR” refers to the polynucleotide sequences framing the payload on the 3′ and 5′ sides. Payload 5′ and 3′ UTRs are located between the payload coding sequence and the ITRs on each side of the payload.

[0657] The 3′ UTR can contain various post-transcriptional regulatable elements which can be used to affect the stability of the message. The 3′UTR may comprise a polyadenylation sequence, such as SV40 late polyadenylation site and others known in the art. The polyadenylation sequence is typically 3′ of other regulatable elements within the 3′UTR. Post-transcriptional regulatable elements which can be used to stabilize the payload mRNA include woodchuck hepatitis virus posttranscriptional regulatable element (WPRE), hepatitis B virus posttranscriptional regulatable element (HBVPRE) RNA transport element (RTE), and any variants thereof. For example, US Publication No. US20140127162, which is herein incorporated by reference in its entirety, describes a shorter WPRE sequence, which functions comparably to the full length WPRE sequence. AU rich elements (AREs) known in the art may also be used to destabilize or to stabilize an mRNA. The 3′ end of the payload construct 3′UTR may also contain a string of Adenosines.

[0658] Vector: As used herein, a “vector” is any molecule or moiety which transports, transduces or otherwise acts as a carrier of a heterologous molecule.

[0659] Vectors of the present invention may be produced recombinantly and may be based on and/or may comprise adeno-associated virus (AAV) parent or reference sequence. Such parent or reference AAV sequences may serve as an original, second, third or subsequent sequence for engineering vectors. In non-limiting examples, such parent or reference AAV sequences may comprise any one or more of the following sequences: a polynucleotide sequence encoding a polypeptide or multi-polypeptide, which sequence may be wild-type or modified from wild-type and which sequence may encode full-length or partial sequence of a protein, protein domain, or one or more subunits of a protein; a polynucleotide comprising a modulatory or regulatory nucleic acid which sequence may be wild-type or modified from wild-type; and a transgene that may or may not be modified from wild-type sequence . These AAV sequences may serve as either the “donor” sequence of one or more codons (at the nucleic acid level) or amino acids (at the polypeptide level) or “acceptor” sequences of one or more codons (at the nucleic acid level) or amino acids (at the polypeptide level).

[0660] Viral construct vector: As used herein, a “viral construct vector” is a vector which comprises one or more polynucleotide regions encoding or comprising Rep and or Cap protein.

[0661] Viral construct expression vector: As used herein, a “viral construct expression vector” is a vector which comprises one or more polynucleotide regions encoding or comprising Rep and or Cap that further comprises one or more polynucleotide regions encoding or comprising components for viral expression in a viral replication cell.

[0662] Viral genome: As used herein, a “viral genome” is a polynucleotide encoding at least one inverted terminal repeat (ITR), at least one regulatory sequence, and at least one payload. The viral genome is derived by replication of a payload construct from the payload construct expression vector. A viral genome encodes at least one copy of the payload construct. Where regulatable elements are encoded, a viral genome encodes at least one copy of the payload construct.

[0663] Viral particle: As used herein, “viral particle” refers to a functional recombinant virus.

### Equivalents and Scope

[0664] Those skilled in the art will recognize, or be able to ascertain using no more than routine experimentation, many equivalents to the specific embodiments in accordance with the invention described herein. The scope of the present invention is not intended to be limited to the above Description, but rather is as set forth in the appended claims.

[0665] In the claims, articles such as “a,” “an,” and “the” may mean one or more than one unless indicated to the contrary or otherwise evident from the context. Claims or descriptions that include “or” between one or more members of a group are considered satisfied if one, more than one, or all of the group members are present in, employed in, or otherwise relevant to a given product or process unless indicated to the contrary or otherwise evident from the context. The invention includes embodiments in which exactly one member of the group is present in, employed in, or otherwise relevant to a given product or process. The invention includes embodiments in which more than one, or the entire group members are present in, employed in, or otherwise relevant to a given product or process.

[0666] It is also noted that the term “comprising” is intended to be open and permits but does not require the inclusion of additional elements or steps. When the term “comprising” is used herein, the term “consisting of” is thus also encompassed and disclosed.

[0667] Where ranges are given, endpoints are included. Furthermore, it is to be understood that unless otherwise indicated or otherwise evident from the context and understanding of one of ordinary skill in the art, values that are expressed as ranges can assume any specific value or subrange within the stated ranges in different embodiments of the invention, to the tenth of the unit of the lower limit of the range, unless the context clearly dictates otherwise.

[0668] In addition, it is to be understood that any particular embodiment, of the present invention that falls within the prior art may be explicitly excluded from any one or more of the claims. Since such embodiments are deemed to be known to one of ordinary skill in the art, they may be excluded even if the exclusion is not set forth explicitly herein. Any particular embodiment, of the compositions of the invention (e.g., any antibiotic, therapeutic or active ingredient; any method of production; any method of use; etc.) can be excluded from any one or more claims, for any reason, whether or not related to the existence of prior art.

[0669] It is to be understood that the words which have been used are words of description rather than limitation, and that changes may be made within the purview of the appended claims without departing from the true scope and spirit of the invention in its broader aspects.

### EXAMPLES

### Example 1

### Gene Expression

[0670] The level of transgene expression by regulatable-AAV particles produced and purified by the methods described herein is determined by real-time quantitative polymerase chain reaction (qPCR). A culture of 293 cells engineered to produce helper components required for AAV production is infected by regulatable-AAV particles produced as described herein.

[0671] The target 293 cells are harvested at a series of time points, lysed and the mRNA is purified. The level of transgene expressed is determined by reverse transcription (qPCR) on a thermal cycler equipped with an excitation source filters, and detector for quantification of the reaction such as, but not limited to, the 7500 FAST Real-Time PCR system (Applied Biosystems, Foster City Calif.).

[0672] Regulatable-AAV particles produced and purified by the methods described herein are treated with proteinase K, serially diluted, and PCR-amplified using a fluor such as, but not limited to, SYBR green (Applied Biosystems, Foster City, Calif.) with primers specific to the transgene sequence. A reference transgene oligonucleotide is used as a copy number standard. The cycling conditions are: 95° C. for 3 min, followed by 35 cycles of 95° C. for 30 sec, 60° C. for 30 sec, and 72° C. for 30 sec.

### Example 2

### Recombinant Regulatable-AAV Production in Invertebrate Cells

[0673] The viral construct vector encodes the three structural cap proteins, VP1, VP2, and VP3, in a single open reading frame regulated by utilization of both alternative splice acceptor and non-canonical translational initiation codon(s). In-frame and out-of-frame ATG triplets preventing translation initiation at a position between the VP1 and VP2 start codons are eliminated. Both Rep78 and Rep52 are translated from a single transcript: Rep78 translation initiates at a non-AUG codon and Rep52 translation initiates at the first AUG in the transcript.

[0674] The nucleotides that encode the structural VP1, VP2, and VP3 capsid proteins and non-structural Rep78 and Rep52 proteins are contained on one viral expression construct under control of the baculovirus major late promoter.

[0675] The payload construct vector encodes two ITR sequences flanking a transgene polynucleotide encoding a polypeptide or modulatory nucleic acid and/or one or more regulatable elements. The ITR sequences allow for replication of a polynucleotide encoding the transgene and ITR sequences alone that will be packaged within the capsid of the viral construct vector. The replicated polynucleotide encodes ITR sequences on the 5′ and 3′ ends of the molecule.

[0676] The payload construct vector and viral construct vector each comprise a Tn7 transposon element that transposes the ITR and payload sequences or the Rep and Cap sequences respectively to a bacmid that comprises the attTn7 attachment site. Competent bacterial DH10 cells are transfected with either the payload construct vector or viral construct vector. The resultant viral construct expression vector and payload construct expression vector produced in the competent cell are then purified by detergent lysis and purification on DNA columns.

[0677] Separate seed cultures of Sf9 cells in serum free suspension culture are transfected with the viral construct expression vector or payload construct expression vector. The cultures are maintained for 48 hours while baculovirus is produced and released into the medium. The baculovirus released into the media continue to infect Sf9 cells in an exponential manner until all of the Sf9 cells in the culture are infected at least once. The baculoviral infected insect cells (BIIC) and media of the seed culture is harvested and divided into aliquots before being frozen in liquid nitrogen.

[0678] A naïve population of un-transfected Sf9 cells is expanded in serum free suspension cell culture conditions. Once the culture growth has reached peak log phase in 1 L of media as measured by optical density the culture is added to a large volume 20 L bioreactor. The bioreactor culture is co-inoculated with a frozen viral construct expression vector and payload construct expression vector BIIC aliquot. The conditions of the Sf9 cell suspension culture is monitored by instruments that measure and/or control external variables that support the growth and activity of viral replication cells such as mass, temperature, CO2, O2, pH, and/or optical density (OD). The Sf9 culture is maintained at optimal conditions until cell population growth has reached peak log phase and before cell growth has plateaued, as measured by optical density.

[0679] In each viral replication cell that has been infected with both baculoviruses the payload flanked on one end with an ITR sequence is replicated pathway producing a viral genome and packaged in a capsid assembled from the proteins VP1, VP2, and VP3.

[0680] The viral replication cells are lysed using the Microfluidizer™ (Microfluidics International Corp., Newton, Mass.), high shear force fluid processor. The resultant cell lysate is clarified by low speed centrifugation followed by tangential flow filtration. The resultant clarified lysate is filtered by a size exclusion column to remove any remaining baculoviral particles from solution. The final steps utilize ultracentrifugation and sterile filtration to produce viral particles suitable for use as described herein.

[0681] The titer of regulatable-AAV particles produced and purified by the methods described herein is determined by real-time quantitative polymerase chain reaction (qPCR) on a thermal cycler equipped with an excitation source filters, and detector for quantification of the reaction such as, but not limited to, the 7500 FAST Real-Time PCR system (Applied Biosystems, Foster City Calif.). Regulatable-AAV particles produced and purified by the methods described herein is treated with proteinase K, serially diluted, and PCR-amplified using a fluor such as, but not limited to, SYBR green (Applied Biosystems, Foster City, Calif.) with primers specific to the AAV genome ITR sequences. A linearized viral genome is used as a copy number standard. The cycling conditions are: 95° C. for 3 min, followed by 35 cycles of 95° C. for 30 sec, 60° C. for 30 sec, and 72° C. for 30 sec.

### Example 3

### Incorporation of Destabilizing Sequences or Domains

[0682] To minimize long-term dsDNA cleavage, regulatable-AAV particles with destabilizing domains and destabilizing RNA sequences are prepared, produced and tested.

### A. Destabilizing Domains—Cas9 Fusion Protein

### Overview

[0683] While not wishing to be bound by theory, destabilizing domains are known to confer instability and decrease transgene expression. The presence of the destabilizing domain can trigger the cell's proteasomal degradation systems, which then can lead to cas9 destruction. Destabilizing domains may comprise peptide sequences which are rich in a particular subset of amino acids which are thought to signal degradation, such as, but not limited to, proline, glutamic acid, serine and threonine (known as PEST sequences).

[0684] In some embodiments, destabilizing domains, which can be used in the cas9-fusion protein encoded by the payload construct expression vector include, but are not limited to, destabilizing domains from FK506 Binding Protein (FKBP), E. coli dihyrofolate reductase (DHFR), mouse ornithine decarboxylase (MODC), and estrogen receptors (ER). As a non-limiting example, the destabilizing domain may be from an estrogen receptor.

### AAV Construct Preparation and Analysis

[0685] In order to study methods to minimize unwanted long-term cleavage of dsDNA, a regulatable particle of Example 2 with a cas9-fusion protein (e.g., a cas9 endonuclease fused to a destabilizing domain) is prepared, produced and tested by methods known in the art and described herein.

[0686] The decreased protein half-life of cas9 endonuclease with a destabilizing domain is tested by transfecting HEK293 cells with the payload construct expression vectors comprising cas9 with or without destabilizing domain. Cells are lysed over a predetermined time course (e.g., 24 hours) post infection and protein extracts prepared for ELISA and Western blot analysis. Further, in separate plates, fluorescently tagged payload construct expression vectors are infected into the same cell system and fluorescence intensity is monitored over time. Additionally, cycloheximide blocking and pulse chase experiments are performed in the same cell system.

### B. Destabilizing RNA Sequences

[0687] To prepare a destabilized RNA sequence, the AAV particle of Example 2 includes a 3′UTR destabilizing sequence. This destabilized RNA sequence may be used to shorten the half-life of cas9.

[0688] One type of 3′UTR destabilizing sequence is AU-rich elements (AREs) and AUUUA motifs. While not wishing to be bound by theory these elements and motifs may be the primary means for mediating mRNA destabilization. Examples of this type of motif are evident in the 3′UTR of human estrogen receptor alpha (hERa) as well as in cytokines, proto-oncogenes and interferon mRNAs.

[0689] To determine the effectiveness of the destabilizing RNA sequence, an AAV particle which encodes cas9 and contains a destabilizing sequence, is produced and purified as in example 2. An AAV particle without the destabilizing sequence is used as a control and produced in parallel. The half-life of cas9 mRNA and/or the corresponding protein levels are analyzed over a predetermined time course in HEK293 cells. Cells are lysed over a time course post infection and RNA and protein extracts are prepared. Half-life of mRNA in both samples is measured by methods known in the art and described herein such as monitoring deadenylation via transcriptional pulsing techniques.

### Example 4

### Punctuated Expression of cas9

[0690] In order to study methods to induce transient, burst expression of cas9, an AAV particle of Example 2 which encodes cas9, a DNA binding domain and a transactivating factor is prepared, produced and tested by methods known in the art and described herein. The cas9 sequence is located in the open reading frame of the vector and a DNA binding domain (DBD) and transactivating factor are located in VP2. The transactivating factor may be coupled to the DBD.

[0691] The DBD may be a pre-engineered DBD targeted specifically to the promoter used for cas9. While not wishing to be bound by theory, upon expression of VP2 in a biological system, the DBD locates and binds to the cas9 promoter. If the transactivating factor is for cas9 and the transactivating factor is coupled to the DBD, upon DBD binding to the cas9 promoter, the transactivating factor drives expression of cas9.

[0692] The nature of the interaction between the promoter and the DBD coupled to a transactivating factor generates a transient, burst expression of cas9. This punctuated expression may be beneficial as it may limit the possibility of side-effects of extended elevated expression of cas9.

[0693] To study the burst expression of cas9, an AAV particle with the DBD and the transactivating factor is purified and produced as described in Example 2. As a control, an AAV particle lacking the DBD and transactivating domain is produced in parallel.

[0694] Expression of cas9 is measured by methods described herein and known in the art, such as in HEK293 cells for the AAV particle with or without the DBD and transactivating factor. Cells are lysed at different time points and protein extracts are prepared for ELISA and Western blot analysis.

[0695] The specificity of cas9 cleavage is confirmed by deep sequencing of samples collected and the extent of dsDNA cleavage by cas9 or cas9-destabilizing domain fusion protein is measured by ligation-mediated purification or genome modification assays such as SURVEYOR. Indel percentage is calculated from the integrated intensities of the undigested PCR product and each of the cleavage products.

### Example 5

### Regulation Through a Rapamycin Inducible System

[0696] The ability of a regulatable element composed of two rapamycin inducible fusion proteins to regulate the expression of a luciferase payload is tested in vitro and in vivo.

### In Vitro Testing

[0697] The following regulatable-AAV constructs are prepared, produced and tested: AAV construct 1 contains a luciferase payload which is driven by a promoter, which is a minimal promoter into which one or more ZHFD1 binding sites are inserted. AAV construct 2 contains the elements of construct 1 and further encodes two dimerizable fusion proteins, FKBP containing the DNA-binding domain of ZHFD1 and FRAP fused to the NF-kappaB p65 transactivation domain. The dimerizable fusion proteins are expressed from one constitutive promotor, and linked together through a 2A peptide sequence. The transcription factor and the transactivation domain fusion proteins both contain a nuclear localization sequence. AAV construct 3 encodes luciferase driven by a CMV promoter for strong constitutive expression (positive control). AAV construct 4 encodes luciferase driven by a CMV promoter for strong constitutive expression and the dimerization fusion proteins driven by a constitutive promoter (positive control).

[0698] Two AAV vectors can be used for transduction, one expressing the regulatable elements (dimerizable transcription factors) and the other expressing the luciferase payload. These are be delivered at a ratio determined to be optimal. Alternatively, one vector is used for transduction, expressing the regulatable elements and the luciferase payload.

[0699] HeLa cells are transduced with the AAV vector(s) constructs 1 through 4, according to methods known in the art in triplicate for each assay. The transduced HeLa cells are incubated in medium in the presence or absence of rapamycin for a set time. Subsequently, cells are harvested according to a time course which includes 24, 48, and 72 hours. The cells are lysed and luciferase activity is measured and compared between untreated and rapamycin treated samples 1 and 2 and the controls (samples 3 and 4).

### In Vivo Testing

[0700] The AAV constructs 1, 2 and 3 are prepared, produced and tested. In addition, a fifth construct derived from construct 2 is prepared, in which the constitutive promoter driving the expression of the dimerizable fusion proteins is replaced by a tissue-specific promoter (liver specific).

[0701] AAV particles containing constructs 1-3 and 5 are each injected into two mice of 3 to 5 months of age according to methods known in the art. At a set time post injection, a further injection of rapamycin is administered to half of the mice. At a predetermined time, mice are injected with luciferin. Animals are then anesthetized and images are acquired with an imaging system. Bioluminescence is measured as total flux (photons/second) of the entire mouse.

### Example 6

### Regulation Through a CRISPR Regulatable Element

[0702] The ability of a CRISPR regulatable elements to regulate the expression of a luciferase payload composed of one or more CRISPR recognition sequences is tested in vitro and in vivo. Cleavage of the payload construct at the CRISPR recognition sequence ablates the payload expression. Using Cas9 with a destabilizing domain shortens the half-life of Cas9.

### In Vitro Testing

[0703] The following CRISPR-AAV constructs are prepared, produced and tested.

[0704] AAV construct 1 encodes a luciferase payload, which is driven by a constitutive promoter and which contains a CRISPR recognition sequence. The recognition sequence is chosen using methods known in the art and described herein to ensure that the sequence is unique to the viral genome and does not occur in the host genome. The AAV construct 2, which contains all of the components of construct 1, and additionally encodes a guide RNA specific to the CRISPR recognition sequence in the luciferase payload and a codon optimized Cas9 with a destabilizing domain. The guide RNA and Cas9 are both expressed from a constitutive promotor. Cas9 also contains a nuclear localization sequence. AAV construct 3 encodes luciferase driven by a CMV promoter without the CRISPR recognition sequence (positive control). AAV construct 4 contains all of the elements of construct 3, and further encodes a guide RNA specific to the CRISPR recognition sequence located in the luciferase payload and a Cas9 with a destabilizing domain. The guide RNA and Cas9 are both expressed from a constitutive promotor. Cas9 also contains a nuclear localization sequence.

[0705] In one example, two AAV vectors are used for transduction, one expressing the regulatable elements (Cas9 and guide RNA) and the other expressing the luciferase payload. These two vectors are delivered at a ratio determined to be optimal. Alternatively, one vector is used for transduction, expressing the regulatable elements and the luciferase payload.

[0706] HeLa cells are transduced with the AAV vector(s) constructs 1 through 4, according to methods known in the art in triplicate for each assay. The transduced HeLa cells are incubated in medium. Subsequently, cells are harvested according to a time course which includes 24, 48, and 72 hours. The cells are lysed and luciferase activity is measured and compared between the samples.

[0707] If the regulatable elements and the luciferase payload are on two separate vectors, the effective dose of the CRISPR regulatable element is determined. HeLa cells are transduced with construct 1 and different doses of the AAV vector encoding Cas9 and the guide RNA, each in triplicate. Cells are harvested, lysed and luciferase activity is measured for each dose of Cas9 and guide RNA employed.

### In Vivo Testing

[0708] The AAV constructs 1 and 2 are prepared, produced and tested. AAV particles 1 and 2 are each injected into mice of 3 to 5 months of age according to methods known in the art. At a set time post injection, such as for example 2 weeks, mice are injected with luciferin. Animals are then anesthetized and images are acquired with an imaging system. Bioluminescence is measured as total flux (photons/second) of the entire mouse and compared between the samples.

### Example 7

### Regulation Through an Inducible Element and a CRISPR Regulatable Element

[0709] The ability of an inducible system to regulate a CRISPR regulatable element, which in turn can regulate the payload in the context of AAV transduction is tested in vitro and in vivo. The ability of a regulatable element composed of two rapamycin inducible fusion proteins to regulate the expression of a CRISPR regulatable element is tested in vitro.

### In Vitro Testing

[0710] The following CRISPR-AAV constructs are prepared, produced and tested. AAV construct 1 encodes a luciferase payload, which contains a CRISPR recognition sequence, driven by a constitutive promoter. The recognition sequence is chosen using methods known in the art and described herein to ensure that the sequence is unique to the viral genome and does not occur in the host genome. AAV construct 2 contains the components of construct 1 and additionally encodes a guide RNA specific to the CRISPR recognition sequence located in the luciferase payload and a codon optimized Cas9 with a destabilizing domain. The guide RNA and Cas9 are both expressed from a constitutive promotor. Cas9 also contains a nuclear localization sequence. AAV construct 3 contains all of the components of construct 1, and additionally encodes a guide RNA specific to the CRISPR recognition sequence located in the luciferase payload and a codon optimized Cas9 with a destabilizing domain. The guide RNA and Cas9 are both expressed from a minimal promotor into which one or more ZHFD1 binding sites are inserted. Cas9 also contains a nuclear localization sequence. AAV construct 4 contains all of the components of construct 3, and additionally encodes two dimerizable fusion proteins, FKBP containing the DNA-binding domain of ZHFD1 and FRAP fused to the NF-kappaB p65 transactivation domain. The dimerizable fusion proteins are expressed from one constitutive promotor, and linked together through a 2A peptide sequence. The transcription factor and the transactivation domain fusion proteins both contain a nuclear localization sequence.

[0711] Two or more AAV vectors can be used for transduction, one or more expressing the regulatable elements (Cas9 and guide RNA, and dimerizable fusion proteins) and an additional vector expressing the luciferase payload. Alternatively, three AAV vectors are used, one encoding the CRISPR regulatable elements, one encoding the dimerizable fusion proteins, and one encoding the luciferase payload. These vectors are delivered at a ratio determined to be optimal. In another embodiment, one vector is used for transduction, expressing the regulatable elements and the luciferase payload. In one embodiment, an open reading frame for the DNA binding domain fusion protein and/or transactivation domain fusion protein is located in VP2.

[0712] HeLa cells are transduced with the AAV vector constructs 1 through 4, according to methods known in the art in triplicate for each assay. The transduced HeLa cells are incubated in medium in the presence or absence of rapamycin for a set time. Subsequently, cells are harvested according to a time course which includes 24, 48, and 72 hours. The cells are lysed and luciferase activity is measured. Throughout the time course, luciferase activity is compared between untreated and rapamycin treated samples for each AAV vector construct and also between samples transduced with the vector constructs 1 through 4.

### In Vivo Testing

[0713] The AAV constructs 1-4 are prepared, produced and tested. In addition, a 5^{th} construct may be added, which is the same as 4, except that the fusion proteins are driven by a tissue specific promoter, such as a liver specific promoter. AAV particles 1-4 are each injected into two mice of 3 to 5 months of age according to methods known in the art. At approximately 2 weeks post injection, a further injection of rapamycin is administered to half of the mice. At a predetermined time, mice are injected with luciferin. Animals are then anesthetized and images are acquired with an imaging system. Bioluminescence is measured as total flux (photons/second) of the entire mouse. Luciferase activity is compared between untreated and rapamycin treated animals and also between animals injected with the AAV particles 1-4.

### Example 8

### Regulation Through an Inducible Element and a TALEN Regulatable Element

[0714] The ability of an inducible system to regulate a TALEN regulatable element, which in turn can regulate the payload in the context of AAV transduction is tested in vitro and in vivo. The ability of a tetracycline regulatable element to regulate the expression of a TALEN regulatable element is tested in vitro.

### In Vitro Testing

[0715] The following regulatable-AAV constructs are prepared, produced and tested. AAV construct 1 encodes a luciferase payload which contains a TALEN recognition sequence driven by a constitutive promoter. The recognition sequence is chosen using methods known in the art and described herein to ensure that the sequence is unique to the viral genome and does not occur in the host genome. AAV construct 2 contains all of the components of construct 1 and further encodes a TALEN, expressed from a constitutive promoter. The TALEN also contains a nuclear localization sequence. AAV construct 3 contains all of the components of construct 1 and additionally encodes a TALEN, whose expression is driven from a minimal promotor into which one or more tetracycline response elements (TRE) are inserted. The TALEN also contains a nuclear localization sequence. AAV construct 4 contains all of the components of construct 3, and additionally encodes a tetracycline transactivator protein (fusion protein of tetracycline repressor TetR and VP16 transactivation domain), driven by a constitutive promoter. The tetracycline transactivator protein contains a nuclear localization sequence.

[0716] In one example, two AAV vectors are used for transduction, one expressing the tetracycline regulatable element and the other expressing the luciferase payload. These vectors are delivered at a ratio determined to be optimal. Alternatively, one vector is used for transduction, expressing the tetracycline regulatable element and the luciferase payload. In one exemplary setup, an open reading frame for the tetracycline regulatable element fusion protein is located in VP2.

[0717] HeLa cells are transduced with the AAV vector constructs 1 through 4, according to methods known in the art in triplicate for each assay. The transduced HeLa cells are incubated in medium in the presence or absence of tetracycline for a set time. Subsequently, cells are harvested according to a time course which includes 24, 48, and 72 hours. The cells are lysed and luciferase activity is measured. Throughout the time course, luciferase activity is compared between untreated and tetracycline treated samples for each AAV vector construct and also between samples transduced with the vector constructs 1 through 4.

### Example 9

### Regulation of a CRISPR Regulatable Element Through a Rapamycin-Inducible Destabilizing Domain

[0718] The ability of a CRISPR regulatable element proteins to regulate the expression of a luciferase payload containing one or more CRISPR recognition sequences is tested. Cleavage of the payload construct at the CRISPR recognition sequence ablates the payload expression. Using Cas9 with a destabilizing domain, which is stabilized by an inducer, allows the Cas9 to be permanently turned off in the absence of inducer. FK506- and rapamycin-binding protein domain is chosen, which can be regulated by rapamycin and its analogs, and is unstable in the absence of its ligand.

### In Vitro Testing

[0719] The following CRISPR-AAV constructs are prepared, produced and tested. AAV construct 1 encodes a luciferase payload, which contains a CRISPR recognition sequence, driven by a constitutive promoter. The recognition sequence is chosen using methods known in the art and described herein to ensure that the sequence is unique to the viral genome and does not occur in the host genome. AAV construct 2 contains the components of construct 1 and additionally encodes a guide RNA specific to the CRISPR recognition sequence located in the luciferase payload and a Cas9 without a destabilizing domain. The guide RNA and Cas9 are both expressed from a constitutive promotor. Cas9 also contains a nuclear localization sequence. AAV construct 3 includes all of the components of construct 1, and additionally encodes a guide RNA specific to the CRISPR recognition sequence found in the luciferase payload and a codon optimized Cas9 with FKBP12 destabilizing domain. The guide RNA and Cas9 are both expressed from a constitutive promotor. Cas9 also contains a nuclear localization sequence.

[0720] In one experimental setup, two or more AAV vectors are used for transduction, one or more vectors expressing the regulatable elements (Cas9 and guide RNA) and the other expressing the luciferase payload. These two vectors are delivered at a ratio determined to be optimal. Alternatively, one vector is used for transduction, expressing the regulatable elements and the luciferase payload.

[0721] HeLa cells are transduced with the AAV vector constructs 1 through 4, according to methods known in the art in triplicate for each assay. The transduced HeLa cells are incubated in medium in the presence or absence of rapamycin for a set time. Subsequently, cells are harvested according to a time course which includes 24, 48, and 72 hours. The cells are lysed and luciferase activity is measured. Throughout the time course, luciferase activity is compared between untreated and rapamycin treated samples for each AAV vector construct and also between samples transduced with the vector constructs 1 through 4.

[0722] Reversibility of the treatment is also tested. For samples transduced with AAV vector 3 and treated with rapamycin for 72 hours, rapamycin is removed from the growth medium for about 24 hours, and the cells are lysed and luciferase activity is measured.

### Example 10

### Regulation Through an siRNA Regulatable Element

[0723] The ability of a siRNA regulatable element proteins to regulate the expression of a luciferase payload containing an siRNA binding sequence is tested in vitro and in vivo. Upon binding of the siRNA to the payload construct mRNA, the mRNA is targeted for degradation.

### In Vitro Testing

[0724] The following regulatable-AAV constructs are prepared, produced and tested. AAV construct 1 contains a luciferase payload, which contains a siRNA binding sequence, driven by a constitutive promoter. The binding sequence is chosen using methods known in the art to ensure that the sequence is unique to the viral mRNA and does not occur in the host exome. AAV construct 2 contains all of the components of construct 1 and additionally encodes a siRNA specific to the siRNA binding sequence located in the luciferase payload construct. The siRNA is expressed from a constitutive promotor. AAV construct 3 encodes luciferase driven by a CMV promoter without the siRNA binding sequence (positive control). The AAV construct 4 encodes luciferase driven by a CMV promoter without the siRNA binding sequence and additionally encodes the siRNA, expressed from a constitutive promoter.

[0725] Two AAV vectors can be used for transduction, one expressing the siRNA and the other expressing the luciferase payload. These two vectors are delivered at a ratio determined to be optimal. Alternatively, one vector may be used for transduction, expressing the siRNA and the luciferase payload.

[0726] HeLa cells are transduced with the AAV vector(s) constructs 1 through 4, according to methods known in the art in triplicate for each assay. The transduced HeLa cells are incubated in medium. Subsequently, cells are harvested according to a time course which includes 24, 48, and 72 hours. The cells are lysed and luciferase activity is measured and compared between the samples.

[0727] If the regulatable elements and the luciferase payload are on 2 separate vectors, the effective dose of the siRNA is determined. HeLa cells are transduced with Construct 1 and different doses of the AAV vector comprising the siRNA, each in triplicate. Cells are harvested, lysed and luciferase activity is measured for each dose of Cas9 and guide RNA employed.

[0728] While the present invention has been described at some length and with some particularity with respect to the several described embodiments, it is not intended that it should be limited to any such particulars or embodiments or any particular embodiment, but it is to be construed with references to the appended claims so as to provide the broadest possible interpretation of such claims in view of the prior art and, therefore, to effectively encompass the intended scope of the invention.

[0729] All publications, patent applications, patents, and other references mentioned herein are incorporated by reference in their entirety. In case of conflict, the present specification, including definitions, will control. In addition, section headings, the materials, methods, and examples are illustrative only and not intended to be limiting.

The application's sequence listing, which the Patent Office published only in electronic form, follows.

SEQUENCE LISTING (791 sequences)

SEQ ID NO: 1 - DNA, 2211 bp, Adeno-associated virus 1
atggctgccgatggttatcttccagattggctcgaggacaacctctctgagggcattcgcgagtggtgggacttgaaacctggagccccgaagcccaaagccaaccagcaaaagcaggacgacggccggggtctggtgcttcctggctacaagtacctcggacccttcaacggactcgacaagggggagcccgtcaacgcggcggacgcagcggccctcgagcacgacaaggcctacgaccagcagctcaaagcgggtgacaatccgtacctgcggtataaccacgccgacgccgagtttcaggagcgtctgcaagaagatacgtcttttgggggcaacctcgggcgagcagtcttccaggccaagaagcgggttctcgaacctctcggtctggttgaggaaggcgctaagacggctcctggaaagaaacgtccggtagagcagtcgccacaagagccagactcctcctcgggcatcggcaagacaggccagcagcccgctaaaaagagactcaattttggtcagactggcgactcagagtcagtccccgatccacaacctctcggagaacctccagcaacccccgctgctgtgggacctactacaatggcttcaggcggtggcgcaccaatggcagacaataacgaaggcgccgacggagtgggtaatgcctcaggaaattggcattgcgattccacatggctgggcgacagagtcatcaccaccagcacccgcacctgggccttgcccacctacaataaccacctctacaagcaaatctccagtgcttcaacgggggccagcaacgacaaccactacttcggctacagcaccccctgggggtattttgatttcaacagattccactgccacttttcaccacgtgactggcagcgactcatcaacaacaattggggattccggcccaagagactcaacttcaaactcttcaacatccaagtcaaggaggtcacgacgaatgatggcgtcacaaccatcgctaataaccttaccagcacggttcaagtcttctcggactcggagtaccagcttccgtacgtcctcggctctgcgcaccagggctgcctccctccgttcccggcggacgtgttcatgattccgcaatacggctacctgacgctcaacaatggcagccaagccgtgggacgttcatccttttactgcctggaatatttcccttctcagatgctgagaacgggcaacaactttaccttcagctacacctttgaggaagtgcctttccacagcagctacgcgcacagccagagcctggaccggctgatgaatcctctcatcgaccaatacctgtattacctgaacagaactcaaaatcagtccggaagtgcccaaaacaaggacttgctgtttagccgtgggtctccagctggcatgtctgttcagcccaaaaactggctacctggaccctgttatcggcagcagcgcgtttctaaaacaaaaacagacaacaacaacagcaattttacctggactggtgcttcaaaatataacctcaatgggcgtgaatccatcatcaaccctggcactgctatggcctcacacaaagacgacgaagacaagttctttcccatgagcggtgtcatgatttttggaaaagagagcgccggagcttcaaacactgcattggacaatgtcatgattacagacgaagaggaaattaaagccactaaccctgtggccaccgaaagatttgggaccgtggcagtcaatttccagagcagcagcacagaccctgcgaccggagatgtgcatgctatgggagcattacctggcatggtgtggcaagatagagacgtgtacctgcagggtcccatttgggccaaaattcctcacacagatggacactttcacccgtctcctcttatgggcggctttggactcaagaacccgcctcctcagatcctcatcaaaaacacgcctgttcctgcgaatcctccggcggagttttcagctacaaagtttgcttcattcatcacccaatactccacaggacaagtgagtgtggaaattgaatgggagctgcagaaagaaaacagcaagcgctggaatcccgaagtgcagtacacatccaattatgcaaaatctgccaacgttgattttactgtggacaacaatggactttatactgagcctcgccccattggcacccgttaccttacccgtcccctgtaa

SEQ ID NO: 2 - protein, 736 aa, Adeno-associated virus 1
MAADGYLPDWLEDNLSEGIREWWDLKPGAPKPKANQQKQDDGRGLVLPGYKYLGPFNGLDKGEPVNAADAAALEHDKAYDQQLKAGDNPYLRYNHADAEFQERLQEDTSFGGNLGRAVFQAKKRVLEPLGLVEEGAKTAPGKKRPVEQSPQEPDSSSGIGKTGQQPAKKRLNFGQTGDSESVPDPQPLGEPPATPAAVGPTTMASGGGAPMADNNEGADGVGNASGNWHCDSTWLGDRVITTSTRTWALPTYNNHLYKQISSASTGASNDNHYFGYSTPWGYFDFNRFHCHFSPRDWQRLINNNWGFRPKRLNFKLFNIQVKEVTTNDGVTTIANNLTSTVQVFSDSEYQLPYVLGSAHQGCLPPFPADVFMIPQYGYLTLNNGSQAVGRSSFYCLEYFPSQMLRTGNNFTFSYTFEEVPFHSSYAHSQSLDRLMNPLIDQYLYYLNRTQNQSGSAQNKDLLFSRGSPAGMSVQPKNWLPGPCYRQQRVSKTKTDNNNSNFTWTGASKYNLNGRESIINPGTAMASHKDDEDKFFPMSGVMIFGKESAGASNTALDNVMITDEEEIKATNPVATERFGTVAVNFQSSSTDPATGDVHAMGALPGMVWQDRDVYLQGPIWAKIPHTDGHFHPSPLMGGFGLKNPPPQILIKNTPVPANPPAEFSATKFASFITQYSTGQVSVEIEWELQKENSKRWNPEVQYTSNYAKSANVDFTVDNNGLYTEPRPIGTRYLTRPL

SEQ ID NO: 3 - DNA, 4718 bp, Adeno-associated virus 1
ttgcccactccctctctgcgcgctcgctcgctcggtggggcctgcggaccaaaggtccgcagacggcagagctctgctctgccggccccaccgagcgagcgagcgcgcagagagggagtgggcaactccatcactaggggtaatcgcgaagcgcctcccacgctgccgcgtcagcgctgacgtaaattacgtcataggggagtggtcctgtattagctgtcacgtgagtgcttttgcgacattttgcgacaccacgtggccatttagggtatatatggccgagtgagcgagcaggatctccattttgaccgcgaaatttgaacgagcagcagccatgccgggcttctacgagatcgtgatcaaggtgccgagcgacctggacgagcacctgccgggcatttctgactcgtttgtgagctgggtggccgagaaggaatgggagctgcccccggattctgacatggatctgaatctgattgagcaggcacccctgaccgtggccgagaagctgcagcgcgacttcctggtccaatggcgccgcgtgagtaaggccccggaggccctcttctttgttcagttcgagaagggcgagtcctacttccacctccatattctggtggagaccacgggggtcaaatccatggtgctgggccgcttcctgagtcagattagggacaagctggtgcagaccatctaccgcgggatcgagccgaccctgcccaactggttcgcggtgaccaagacgcgtaatggcgccggaggggggaacaaggtggtggacgagtgctacatccccaactacctcctgcccaagactcagcccgagctgcagtgggcgtggactaacatggaggagtatataagcgcctgtttgaacctggccgagcgcaaacggctcgtggcgcagcacctgacccacgtcagccagacccaggagcagaacaaggagaatctgaaccccaattctgacgcgcctgtcatccggtcaaaaacctccgcgcgctacatggagctggtcgggtggctggtggaccggggcatcacctccgagaagcagtggatccaggaggaccaggcctcgtacatctccttcaacgccgcttccaactcgcggtcccagatcaaggccgctctggacaatgccggcaagatcatggcgctgaccaaatccgcgcccgactacctggtaggccccgctccgcccgcggacattaaaaccaaccgcatctaccgcatcctggagctgaacggctacgaacctgcctacgccggctccgtctttctcggctgggcccagaaaaggttcgggaagcgcaacaccatctggctgtttgggccggccaccacgggcaagaccaacatcgcggaagccatcgcccacgccgtgcccttctacggctgcgtcaactggaccaatgagaactttcccttcaatgattgcgtcgacaagatggtgatctggtgggaggagggcaagatgacggccaaggtcgtggagtccgccaaggccattctcggcggcagcaaggtgcgcgtggaccaaaagtgcaagtcgtccgcccagatcgaccccacccccgtgatcgtcacctccaacaccaacatgtgcgccgtgattgacgggaacagcaccaccttcgagcaccagcagccgttgcaggaccggatgttcaaatttgaactcacccgccgtctggagcatgactttggcaaggtgacaaagcaggaagtcaaagagttcttccgctgggcgcaggatcacgtgaccgaggtggcgcatgagttctacgtcagaaagggtggagccaacaaaagacccgcccccgatgacgcggataaaagcgagcccaagcgggcctgcccctcagtcgcggatccatcgacgtcagacgcggaaggagctccggtggactttgccgacaggtaccaaaacaaatgttctcgtcacgcgggcatgcttcagatgctgtttccctgcaagacatgcgagagaatgaatcagaatttcaacatttgcttcacgcacgggacgagagactgttcagagtgcttccccggcgtgtcagaatctcaaccggtcgtcagaaagaggacgtatcggaaactctgtgccattcatcatctgctggggcgggctcccgagattgcttgctcggcctgcgatctggtcaacgtggacctggatgactgtgtttctgagcaataaatgacttaaaccaggtatggctgccgatggttatcttccagattggctcgaggacaacctctctgagggcattcgcgagtggtgggacttgaaacctggagccccgaagcccaaagccaaccagcaaaagcaggacgacggccggggtctggtgcttcctggctacaagtacctcggacccttcaacggactcgacaagggggagcccgtcaacgcggcggacgcagcggccctcgagcacgacaaggcctacgaccagcagctcaaagcgggtgacaatccgtacctgcggtataaccacgccgacgccgagtttcaggagcgtctgcaagaagatacgtcttttgggggcaacctcgggcgagcagtcttccaggccaagaagcgggttctcgaacctctcggtctggttgaggaaggcgctaagacggctcctggaaagaaacgtccggtagagcagtcgccacaagagccagactcctcctcgggcatcggcaagacaggccagcagcccgctaaaaagagactcaattttggtcagactggcgactcagagtcagtccccgatccacaacctctcggagaacctccagcaacccccgctgctgtgggacctactacaatggcttcaggcggtggcgcaccaatggcagacaataacgaaggcgccgacggagtgggtaatgcctcaggaaattggcattgcgattccacatggctgggcgacagagtcatcaccaccagcacccgcacctgggccttgcccacctacaataaccacctctacaagcaaatctccagtgcttcaacgggggccagcaacgacaaccactacttcggctacagcaccccctgggggtattttgatttcaacagattccactgccacttttcaccacgtgactggcagcgactcatcaacaacaattggggattccggcccaagagactcaacttcaaactcttcaacatccaagtcaaggaggtcacgacgaatgatggcgtcacaaccatcgctaataaccttaccagcacggttcaagtcttctcggactcggagtaccagcttccgtacgtcctcggctctgcgcaccagggctgcctccctccgttcccggcggacgtgttcatgattccgcaatacggctacctgacgctcaacaatggcagccaagccgtgggacgttcatccttttactgcctggaatatttcccttctcagatgctgagaacgggcaacaactttaccttcagctacacctttgaggaagtgcctttccacagcagctacgcgcacagccagagcctggaccggctgatgaatcctctcatcgaccaatacctgtattacctgaacagaactcaaaatcagtccggaagtgcccaaaacaaggacttgctgtttagccgtgggtctccagctggcatgtctgttcagcccaaaaactggctacctggaccctgttatcggcagcagcgcgtttctaaaacaaaaacagacaacaacaacagcaattttacctggactggtgcttcaaaatataacctcaatgggcgtgaatccatcatcaaccctggcactgctatggcctcacacaaagacgacgaagacaagttctttcccatgagcggtgtcatgatttttggaaaagagagcgccggagcttcaaacactgcattggacaatgtcatgattacagacgaagaggaaattaaagccactaaccctgtggccaccgaaagatttgggaccgtggcagtcaatttccagagcagcagcacagaccctgcgaccggagatgtgcatgctatgggagcattacctggcatggtgtggcaagatagagacgtgtacctgcagggtcccatttgggccaaaattcctcacacagatggacactttcacccgtctcctcttatgggcggctttggactcaagaacccgcctcctcagatcctcatcaaaaacacgcctgttcctgcgaatcctccggcggagttttcagctacaaagtttgcttcattcatcacccaatactccacaggacaagtgagtgtggaaattgaatgggagctgcagaaagaaaacagcaagcgctggaatcccgaagtgcagtacacatccaattatgcaaaatctgccaacgttgattttactgtggacaacaatggactttatactgagcctcgccccattggcacccgttaccttacccgtcccctgtaattacgtgttaatcaataaaccggttgattcgtttcagttgaactttggtctcctgtccttcttatcttatcggttaccatggttatagcttacacattaactgcttggttgcgcttcgcgataaaagacttacgtcatcgggttacccctagtgatggagttgcccactccctctctgcgcgctcgctcgctcggtggggcctgcggaccaaaggtccgcagacggcagagctctgctctgccggccccaccgagcgagcgagcgcgcagagagggagtgggcaa

SEQ ID NO: 4 - DNA, 3131 bp, Adeno-associated virus
gcggccgcgaattcgcccttggctgcgtcaactggaccaatgagaactttcccttcaatgattgcgtcgacaagatggtgatctggtgggaggagggcaagatgacggccaaggtcgtggagtccgccaaggccattctcggcggcagcaaggtgcgcgtggaccaaaagtgcaagtcgtccgcccagatcgaccccacccccgtgatcgtcacctccaacaccaacatgtgcgccgtgattgacgggaacagcaccaccttcgagcaccagcagcctctccaggaccggatgtttaagttcgaactcacccgccgtctggagcacgactttggcaaggtgacaaagcaggaagtcaaagagttcttccgctgggccagtgatcacgtgaccgaggtggcgcatgagttttacgtcagaaagggcggagccagcaaaagacccgcccccgatgacgcggataaaagcgagcccaagcgggcctgcccctcagtcgcggatccatcgacgtcagacgcggaaggagctccggtggactttgccgacaggtaccaaaacaaatgttctcgtcacgcgggcatgcttcagatgctgtttccctgcaaaacgtgcgagagaatgaatcggaatttcaacatttgcttcacacacggggtcagagactgctcagagtgtttccccggcgtgtcagaatctcaaccggtcgtcagaaagaggacgtatcggaaactccgtgcgattcatcatctgctggggcgggctcccgagattgcttgctcggcctgcgatctggtcaacgtggacctggatgactgtgtttctgagcaataaatgacttaaaccaggtatggctgccgatggttatcttccagattggctcgaggacaacctctctgagggcattcgcgagtggtgggcgctgaaacctggagccccgaagcccaaagccaaccagcaaaagcaggacgacggccggggtctggtgcttcctggctacaagtacctcggacccttcaacggactcgacaagggggagcccgtcaacgcggcggacgcagcggccctcgagcacgacaaggcttacgaccagcagctgcaggcgggtgacaatccgtacctgcggtataaccacgccgacgccgagtttcaggagcgtctgcaagaagatacgtcttttgggggcaacctcgggcgagcagtcttccaggccaagaagcgggttctcgaacctctcggtctggttgaggaaggcgctaagacggctcctggaaagaagagaccggtagagccatcaccccagcgttctccagactcctctacgggcatcggcaagaaaggccaacagcccgccagaaaaagactcaattttggtcagactggcgactcagagtcagttccagaccctcaacctctcggagaacctccagcagcgccctctggtgtgggacctaatacaatggctgcaggcggtggcgcaccaatggcagacaataacgaaggcgccgacggagtgggtagttcctcgggaaattggcattgcgattccacatggctgggcgacagagtcatcaccaccagcacccgaacctgggccctgcccacctacaacaaccacctctacaagcaaatctccaacgggacatcgggaggagccaccaacgacaacacctacttcggctacagcaccccctgggggtattttgactttaacagattccactgccacctttcaccacgtgactggcagcgactcatcaacaacaactggggattccgacccaagagactcagcttcaagctcttcaacatccaggtcaaggaggtcacgcagaatgaaggcaccaagaccatcgccaataacctcaccagcaccatccaggtgtttacggactcggagtaccagctgccgtacgttctcggctctgtccaccagggctgcctgcctccgttcccggcggacgtgttcatgattccccagtacggctacctaacactcaacaacggtagtcaggccgtgggacgctcctccttctactgcctggaatactttccttcgcagatgctgagaaccggcaacaacttccagtttacttacaccttcgaggacgtgcctttccacagcagctacgcccacagctagagcttggaccggctgatgaatcctctgattgaccagtacctgtactacttgtctcggactcaaacaacaggaggcacggcaaatacgcagactctgggcttcagccaaggtgggcctaatacaatggccaatcaggcaaagaactggctgccaggaccctgttaccgccaacaacgcgtctcaacgacaaccgggcaaaacaacaatagcaactttgcctggactgctgggaccaaataccatctgaatggaagaaattcattggctaatcctggcatcgctatggcaacacacaaagacgacgaggagcgtttttttcccagtaacgggatcctgatttttggcaaacaaaatgctgccagagacaatgcggattacagcgatgtcatgctcaccagcgaggaagaaatcaaaaccactaaccctgtggctacagaggaatacggtatcgtggcagataacttgcagcagcaaaacacggctcctcaaattggaactgtcaacagccagggggccttacccggtatggtctggcagaaccgggacgtgtacctgcagggtcccatctgggccaagattcctcacacggacggcaacttccacccgtctccgctgatgggcggctttggcctgaaacatcctccgcctcagatcctgatcaagaacacgcctgtacctgcggatcctccgaccaccttcaaccagtcaaagctgaactctttcatcacgcaatacagcaccggacaggtcagcgtggaaattgaatgggagctgcagaaggaaaacagcaagcgctggaaccccgagatccagtacacctccaactactacaaatctataagtgtggactttgctgttaatacagaaggcgtgtactctgaaccccgccccattggcacccgttacctcacccgtaatctgtaattgcctgttaatcaataaaccggttgattcgtttcagttgaactttggtctctgcgaagggcgaattc

SEQ ID NO: 5 - DNA, 255 bp, Adeno-associated virus 10
ggtaattcctccggaaattggcattgcgattccacatggctgggcgacagagtcatcaccaccagcacccgaacctgggtcctgcccacctacaacaaccacatctacaagcaaatctccagcgagacaggagccaccaacgacaaccactacttcggctacagcaccccctgggggtattttgactttaacagattccactgccacttttcaccacgtgactggcagcgactcatcaacaacaactggggattc

SEQ ID NO: 6 - protein, 738 aa, Adeno-associated virus 10
MAADGYLPDWLEDNLSEGIREWWDLKPGAPKPKANQQKQDDGRGLVLPGYKYLGPFNGLDKGEPVNAADAAALEHDKAYDQQLKAGDNPYLRYNHADAEFQERLQEDTSFGGNLGRAVFQAKKRVLEPLGLVEEAAKTAPGKKRPVEPSPQRSPDSSTGIGKKGQQPAKKRLNFGQTGESESVPDPQPIGEPPAGPSGLGSGTMAAGGGAPMADNNEGADGVGSSSGNWHCDSTWLGDRVITTSTRTWALPTYNNHLYKQISNGTSGGSTNDNTYFGYSTPWGYFDFNRFHCHFSPRDWQRLINNNWGFRPKRLSFKLFNIQVKEVTQNEGTKTIANNLTSTIQVFTDSEYQLPYVLGSAHQGCLPPFPADVFMIPQYGYLTLNNGSQAVGRSSFYCLEYFPSQMLRTGNNFEFSYTFEDVPFHSSYAHSQSLDRLMNPLIDQYLYYLSRTQSTGGTQGTQQLLFSQAGPANMSAQAKNWLPGPCYRQQRVSTTLSQNNNSNFAWTGATKYHLNGRDSLVNPGVAMATHKDDEERFFPSSGVLMFGKQGAGRDNVDYSSVMLTSEEEIKTTNPVATEQYGVVADNLQQANTGPIVGNVNSQGALPGMVWQNRDVYLQGPIWAKIPHTDGNFHPSPLMGGFGLKHPPPQILIKNTPVPADPPTTFSQAKLASFITQYSTGQVSVEIEWELQKENSKRWNPEIQYTSNYYKSTNVDFAVNTEGTYSEPRPIGTRYLTRNL

SEQ ID NO: 7 - protein, 738 aa, Adeno-associated virus 10
MAADGYLPDWLEDNLSEGIREWWDLKPGAPKPKANQQKQDDGRGLVLPGYKYLGPFNGLDKGEPVNAADAAALEHDKAYDQQLKAGDNPYLRYNHADAEFQERLQEDTSFGGNLGRAVFQAKKRVLEPLGLVEEGAKTAPGKKRPVEPSPQRSPDSSTGIGKKGQQPAKKRLNFGQTGDSESVPDPQPIGEPPAGPSGLGSGTMAAGGGAPMADNNEGADGVGSSSGNWHCDSTWLGDRVITTSTRTWALPTYNNHLYKQISNGTSGGSTNDNTYFGYSTPWGYFDFNRFHCHFSPRDWQRLINNNWGFRPKRLNFKLFNIQVKEVTQNEGTKTIANNLTSTIQVFTDSEYQLPYVLGSAHQGCLPPFPADVFMIPQYGYLTLNNGSQAVGRSSFYCLEYFPSQMLRTGNNFEFSYQFEDVPFHSSYAHSQSLDRLMNPLIDQYLYYLSRTQSTGGTAGTQQLLFSQAGPNNMSAQAKNWLPGPCYRQQRVSTTLSQNNNSNFAWTGATKYHLNGRDSLVNPGVAMATHKDDEERFFPSSGVLMFGKQGAGKDNVDYSSVMLTSEEEIKTTNPVATEQYGVVADNLQQQNAAPIVGAVNSQGALPGMVWQNRDVYLQGPIWAKIPHTDGNFHPSPLMGGFGLKHPPPQILIKNTPVPADPPTTFSQAKLASFITQYSTGQVSVEIEWELQKENSKRWNPEIQYTSNYYKSTNVDFAVNTDGTYSEPRPIGTRYLTRNL

SEQ ID NO: 8 - DNA, 258 bp, Adeno-associated virus 11
ggtaattcctccggaaattggcattgcgattccacatggctgggcgacagagtcatcaccaccagcacccgaacctgggccctgccaacctacaacaaccacctctacaaacaaatctccagcgcttcaacgggggccagcaacgacaaccactactttggctacagcaccccctgggggtattttgactttaacagattccactgccacttctcaccacgtgactggcagcgactcatcaacaacaactggggattc

SEQ ID NO: 9 - DNA, 255 bp, Adeno-associated virus 12
ggtaattcctccggaaattggcattgcgattccacatggctgggcgaccgagtcattaccaccagcacccggacttgggccctgcccacctacaacaaccacctctacaagcaaatctccagccaatcgggtgccaccaacgacaaccactacttcggctacagcaccccttgggggtattttgatttcaacagattccactgccatttctcaccacgtgactggcagcgactcatcaacaacaactggggattc

SEQ ID NO: 10 - DNA, 2208 bp, Adeno-associated virus 2
atggctgccgatggttatcttccagattggctcgaggacactctctctgaaggaataagacagtggtggaagctcaaacctggcccaccaccaccaaagcccgcagagcggcataaggacgacagcaggggtcttgtgcttcctgggtacaagtacctcggacccttcaacggactcgacaagggagagccggtcaacgaggcagacgccgcggccctcgagcacgacaaagcctacgaccggcagctcgacagcggagacaacccgtacctcaagtacaaccacgccgacgcggagtttcaggagcgccttaaagaagatacgtcttttgggggcaacctcggacgagcagtcttccaggcgaaaaagagggttcttgaacctctgggcctggttgaggaacctgttaagacggctccgggaaaaaagaggccggtagagcactctcctgtggagccagactcctcctcgggaaccggaaaggcgggccagcagcctgcaagaaaaagattgaattttggtcagactggagacgcagactcagtacctgacccccagcctctcggacagccaccagcagccccctctggtctgggaactaatacgatggctacaggcagtggcgcaccaatggcagacaataacgagggcgccgacggagtgggtaattcctcgggaaattggcattgcgattccacatggatgggcgacagagtcatcaccaccagcacccgaacctgggccctgcccacctacaacaaccacctctacaaacaaatttccagccaatcaggagcctcgaacgacaatcactactttggctacagcaccccttgggggtattttgacttcaacagattccactgccacttttcaccacgtgactggcaaagactcatcaacaacaactggggattccgacccaagagactcaacttcaagctctttaacattcaagtcaaagaggtcacgcagaatgacggtacgacgacgattgccaataaccttaccagcacggttcaggtgtttactgactcggagtaccagctcccgtacgtcctcggctcggcgcatcaaggatgcctcccgccgttcccagcagacgtcttcatggtgccacagtatggatacctcaccctgaacaacgggagtcaggcagtaggacgctcttcattttactgcctggagtactttccttctcagatgctgcgtaccggaaacaactttaccttcagctacacttttgaggacgttcctttccacagcagctacgctcacagccagagtctggaccgtctcatgaatcctctcatcgaccagtacctgtattacttgagcagaacaaacactccaagtggaaccaccacgcagtcaaggcttcagttttctcaggccggagcgagtgacattcgggaccagtctaggaactggcttcctggaccctgttaccgccagcagcgagtatcaaagacatctgcggataacaacaacagtgaatactcgtggactggagctaccaagtaccacctcaatggcagagactctctggtgaatccgggcccggccatggcaagccacaaggacgatgaagaaaagttttttcctcagagcggggttctcatctttgggaagcaaggctcagagaaaacaaatgtggacattgaaaaggtcatgattacagacgaagaggaaatcaggacaaccaatcccgtggctacggagcagtatggttctgtatctaccaacctccagagaggcaacagacaagcagctaccgcagatgtcaacacacaaggcgttcttccaggcatggtctggcaggacagagatgtgtaccttcaggggcccatctgggcaaagattccacacacggacggacattttcacccctctcccctcatgggtggattcggacttaaacaccctcctccacagattctcatcaagaacaccccggtacctgcgaatccttcgaccaccttcagtgcggcaaagtttgcttccttcatcacacagtactccacgggacaggtcagcgtggagatcgagtgggagctgcagaaggaaaacagcaaacgctggaatcccgaaattcagtacacttccaactacaacaagtctgttaatgtggactttactgtggacactaatggcgtgtattcagagcctcgccccattggcaccagatacctgactcgtaatctgtaa

SEQ ID NO: 11 - protein, 735 aa, Adeno-associated virus 2 [sequence omitted]

SEQ ID NO: 12 - protein, 621 aa, Adeno-associated virus 2
MPGFYEIVIKVPSDLDGHLPGISDSFVNWVAEKEWELPPDSDMDLNLIEQAPLTVAEKLQRDFLTEWRRVSKAPEALFFVQFEKGESYFHMHVLVETTGVKSMVLGRFLSQIREKLIQRIYRGIEPTLPNWFAVTKTRNGAGGGNKVVDECYIPNYLLPKTQPELQWAWTNMEQYLSACLNLTERKRLVAQHLTHVSQTQEQNKENQNPNSDAPVIRSKTSARYMELVGWLVDKGITSEKQWIQEDQASYISFNAASNSRSQIKAALDNAGKIMSLTKTAPDYLVGQQPVEDISSNRIYKILELNGYDPQYAASVFLGWATKKFGKRNTIWLFGPATTGKTNIAEAIAHTVPFYGCVNWTNENFPFNDCVDKMVIWWEEGKMTAKVVESAKAILGGSKVRVDQKCKSSAQIDPTPVIVTSNTNMCAVIDGNSTTFEHQQPLQDRMFKFELTRRLDHDFGKVTKQEVKDFFRWAKDHVVEVEHEFYVKKGGAKKRPAPSDADISEPKRVRESVAQPSTSDAEASINYADRYQNKCSRHVGMNLMLFPCRQCERMNQNSNICFTHGQKDCLECFPVSESQPVSVVKKAYQKLCYIHHIMGKVPDACTACDLVNVDLDDCIFEQ

SEQ ID NO: 13 - DNA, 4675 bp, Adeno-associated virus 2
ttggccactccctctctgcgcgctcgctcgctcactgaggccgggcgaccaaaggtcgcccgacgcccgggctttgcccgggcggcctcagtgagcgagcgagcgcgcagagagggagtggccaactccatcactaggggttcctggaggggtggagtcgtgacgtgaattacgtcatagggttagggaggtcctgtattagaggtcacgtgagtgttttgcgacattttgcgacaccatgtggtcacgctgggtatttaagcccgagtgagcacgcagggtctccattttgaagcgggaggtttgaacgcgcagccgccatgccggggttttacgagattgtgattaaggtccccagcgaccttgacgggcatctgcccggcatttctgacagctttgtgaactgggtggccgagaaggaatgggagttgccgccagattctgacatggatctgaatctgattgagcaggcacccctgaccgtggccgagaagctgcagcgcgactttctgacggaatggcgccgtgtgagtaaggccccggaggcccttttctttgtgcaatttgagaagggagagagctacttccacatgcacgtgctcgtggaaaccaccggggtgaaatccatggttttgggacgtttcctgagtcagattcgcgaaaaactgattcagagaatttaccgcgggatcgagccgactttgccaaactggttcgcggtcacaaagaccagaaatggcgccggaggcgggaacaaggtggtggatgagtgctacatccccaattacttgctccccaaaacccagcctgagctccagtgggcgtggactaatatggaacagtatttaagcgcctgtttgaatctcacggagcgtaaacggttggtggcgcagcatctgacgcacgtgtcgcagacgcaggagcagaacaaagagaatcagaatcccaattctgatgcgccggtgatcagatcaaaaacttcagccaggtacatggagctggtcgggtggctcgtggacaaggggattacctcggagaagcagtggatccaggaggaccaggcctcatacatctccttcaatgcggcctccaactcgcggtcccaaatcaaggctgccttggacaatgcgggaaagattatgagcctgactaaaaccgcccccgactacctggtgggccagcagcccgtggaggacatttccagcaatcggatttataaaattttggaactaaacgggtacgatccccaatatgcggcttccgtctttctgggatgggccacgaaaaagttcggcaagaggaacaccatctggctgtttgggcctgcaactaccgggaagaccaacatcgcggaggccatagcccacactgtgcccttctacgggtgcgtaaactggaccaatgagaactttcccttcaacgactgtgtcgacaagatggtgatctggtgggaggaggggaagatgaccgccaaggtcgtggagtcggccaaagccattctcggaggaagcaaggtgcgcgtggaccagaaatgcaagtcctcggcccagatagacccgactcccgtgatcgtcacctccaacaccaacatgtgcgccgtgattgacgggaactcaacgaccttcgaacaccagcagccgttgcaagaccggatgttcaaatttgaactcacccgccgtctggatcatgactttgggaaggtcaccaagcaggaagtcaaagactttttccggtgggcaaaggatcacgtggttgaggtggagcatgaattctacgtcaaaaagggtggagccaagaaaagacccgcccccagtgacgcagatataagtgagcccaaacgggtgcgcgagtcagttgcgcagccatcgacgtcagacgcggaagcttcgatcaactacgcagacaggtaccaaaacaaatgttctcgtcacgtgggcatgaatctgatgctgtttccctgcagacaatgcgagagaatgaatcagaattcaaatatctgcttcactcacggacagaaagactgtttagagtgctttcccgtgtcagaatctcaacccgtttctgtcgtcaaaaaggcgtatcagaaactgtgctacattcatcatatcatgggaaaggtgccagacgcttgcactgcctgcgatctggtcaatgtggatttggatgactgcatctttgaacaataaatgatttaaatcaggtatggctgccgatggttatcttccagattggctcgaggacactctctctgaaggaataagacagtggtggaagctcaaacctggcccaccaccaccaaagcccgcagagcggcataaggacgacagcaggggtcttgtgcttcctgggtacaagtacctcggacccttcaacggactcgacaagggagagccggtcaacgaggcagacgccgcggccctcgagcacgtacaaagcctacgaccggcagctcgacagcggagacaacccgtacctcaagtacaaccacgccgacgcggagtttcaggagcgccttaaagaagatacgtcttttgggggcaacctcggacgagcagtcttccaggcgaaaaagagggttcttgaacctctgggcctggttgaggaacctgttaagacggctccgggaaaaaagaggccggtagagcactctcctgtggagccagactcctcctcgggaaccggaaaggcgggccagcagcctgcaagaaaaagattgaattttggtcagactggagacgcagactcagtacctgacccccagcctctcggacagccaccagcagccccctctggtctgggaactaatacgatggctacaggcagtggcgcaccaatggcagacaataacgagggcgccgacggagtgggtaattcctccggaaattggcattgcgattccacatggatgggcgacagagtcatcaccaccagcacccgaacctgggccctgcccacctacaacaaccacctctacaaacaaatttccagccaatcaggagcctcgaacgacaatcactactttggctacagcaccccttgggggtattttgacttcaacagattccactgccacttttcaccacgtgactggcaaagactcatcaacaacaactggggattccgacccaagagactcaacttcaagctctttaacattcaagtcaaagaggtcacgcagaatgacggtacgacgacgattgccaataaccttaccagcacggttcaggtgtttactgactcggagtaccagctcccgtacgtcctcggctcggcgcatcaaggatgcctcccgccgttcccagcagacgtcttcatggtgccacagtatggatacctcaccctgaacaacgggagtcaggcagtaggacgctcttcattttactgcctggagtactttccttctcagatgctgcgtaccggaaacaactttaccttcagctacacttttgaggacgttcctttccacagcagctacgctcacagccagagtctggaccgtctcatgaatcctctcatcgaccagtacctgtattacttgagcagaacaaacactccaagtggaaccaccacgcagtcaaggcttcagttttctcaggccggagcgagtgacattcgggaccagtctaggaactggcttcctggaccctgttaccgccagcagcgagtatcaaagacatctgcggataacaacaacagtgaatactcgtggactggagctaccaagtaccacctcaatggcagagactctctggtgaatccggccatggcaagccacaaggacgatgaagaaaagttttttcctcagagcggggttctcatctttgggaagcaaggctcagagaaaacaaatgtgaacattgaaaaggtcatgattacagacgaagaggaaatcggaacaaccaatcccgtggctacggagcagtatggttctgtatctaccaacctccagagaggcaacagacaagcagctaccgcagatgtcaacacacaaggcgttcttccaggcatggtctggcaggacagagatgtgtaccttcaggggcccatctgggcaaagattccacacacggacggacattttcacccctctcccctcatgggtggattcggacttaaacaccctcctccacagattctcatcaagaacaccccggtacctgcgaatccttcgaccaccttcagtgcggcaaagtttgcttccttcatcacacagtactccacgggacacggtcagcgtggagatcgagtgggagctgcagaaggaaaacagcaaacgctggaatcccgaaattcagtacacttccaactacaacaagtctgttaatcgtggacttaccgtggatactaatggcgtgtattcagagcctcgccccattggcaccagatacctgactcgtaatctgtaattgcttgttaatcaataaaccgtttaattcgtttcagttgaactttggtctctgcgtatttctttcttatctagtttccatggctacgtagataagtagcatggcgggttaatcattaactacaaggaacccctagtgatggagttggccactccctctctgcgcgctcgctcgctcactgaggccgggcgaccaaaggtcgcccgacgcccgggctttgcccgggcggcctcagtgagcgagcgagcgcgcagagagggagtggccaa

SEQ ID NO: 14 - DNA, 4679 bp, Adeno-associated virus 2
ttggccactccctctctgcgcgctcgctcgctcactgaggccgggcgaccaaaggtcgcccgacgcccgggctttgcccgggcggcctcagtgagcgagcgagcgcgcagagagggagtggccaactccatcactaggggttcctggaggggtggagtcgtgacgtgaattacgtcatagggttagggaggtcctgtattagaggtcacgtgagtgttttgcgacattttgcgacaccatgtggtcacgctgggtatttaagcccgagtgagcacgcagggtctccattttgaagcgggaggtttgaacgcgcagccgccatgccggggttttacgagattgtgattaaggtccccagcgaccttgacgggcatctgcccggcatttctgacagctttgtgaactgggtggccgagaaggaatgggagttgccgccagattctgacatggatctgaatctgattgagcaggcacccctgaccgtggccgagaagctgcagcgcgactttctgacggaatggcgccgtgtgagtaaggccccggaggcccttttctttgtgcaatttgagaagggagagagctacttccacatgcacgtgctcgtggaaaccaccggggtgaaatccatggttttgggacgtttcctgagtcagattcgcgaaaaactgattcagagaatttaccgcgggatcgagccgactttgccaaactggttcgcggtcacaaagaccagaaatggcgccggaggcgggaacaaggtggtggatgagtgctacatccccaattacttgctccccaaaacccagcctgagctccagtgggcgtggactaatatggaacagtatttaagcgcctgtttgaatctcacggagcgtaaacggttggtggcgcagcatctgacgcacgtgtcgcagacgcaggagcagaacaaagagaatcagaatcccaattctgatgcgccggtgatcagatcaaaaacttcagccaggtacatggagctggtcgggtggctcgtggacaaggggattacctcggagaagcagtggatccaggaggaccaggcctcatacatctccttcaatgcggcctccaactcgcggtcccaaatcaaggctgccttggacaatgcgggaaagattatgagcctgactaaaaccgcccccgactacctggtgggccagcagcccgtggaggacatttccagcaatcggatttataaaattttggaactaaacgggtacgatccccaatatgcggcttccgtctttctgggatgggccacgaaaaagttcggcaagaggaacaccatctggctgtttgggcctgcaactaccgggaagaccaacatcgcggaggccatagcccacactgtgcccttctacgggtgcgtaaactggaccaatgagaactttcccttcaacgactgtgtcgacaagatggtgatctggtgggaggaggggaagatgaccgccaaggtcgtggagtcggccaaagccattctcggaggaagcaaggtgcgcgtggaccagaaatgcaagtcctcggcccagatagacccgactcccgtgatcgtcacctccaacaccaacatgtgcgccgtgattgacgggaactcaacgaccttcgaacaccagcagccgttgcaagaccggatgttcaaatttgaactcacccgccgtctggatcatgactttgggaaggtcaccaagcaggaagtcaaagactttttccggtgggcaaaggatcacgtggttgaggtggagcatgaattctacgtcaaaaagggtggagccaagaaaagacccgcccccagtgacgcagatataagtgagcccaaacgggtgcgcgagtcagttgcgcagccatcgacgtcagacgcggaagcttcgatcaactacgcagacaggtaccaaaacaaatgttctcgtcacgtgggcatgaatctgatgctgtttccctgcagacaatgcgagagaatgaatcagaattcaaatatctgcttcactcacggacagaaagactgtttagagtgctttcccgtgtcagaatctcaacccgtttctgtcgtcaaaaaggcgtatcagaaactgtgctacattcatcatatcatgggaaaggtgccagacgcttgcactgcctgcgatctggtcaatgtggatttggatgactgcatctttgaacaataaatgatttaaatcaggtatggctgccgatggttatcttccagattggctcgaggacactctctctgaaggaataagacagtggtggaagctcaaacctggcccaccaccaccaaagcccgcagagcggcataaggacgacagcaggggtcttgtgcttcctgggtacaagtacctcggacccttcaacggactcgacaagggagagccggtcaacgaggcagacgccgcggccctcgagcacgacaaagcctacgaccggcagctcgacagcggagacaacccgtacctcaagtacaaccacgccgacgcggagtttcaggagcgccttaaagaagatacgtcttttgggggcaacctcggacgagcagtcttccaggcgaaaaagagggttcttgaacctctgggcctggttgaggaacctgttaagacggctccgggaaaaaagaggccggtagagcactctcctgtggagccagactcctcctcgggaaccggaaaggcgggccagcagcctgcaagaaaaagattgaattttggtcagactggagacgcagactcagtacctgacccccagcctctcggacagccaccagcagccccctctggtctgggaactaatacgatggctacaggcagtggcgcaccaatggcagacaataacgagggcgccgacggagtgggtaattcctccggaaattggcattgcgattccacatggatgggcgacagagtcatcaccaccagcacccgaacctgggccctgcccacctacaacaaccacctctacaaacaaatttccagccaatcaggagcctcgaacgacaatcactactttggctacagcaccccttgggggtattttgacttcaacagattccactgccacttttcaccacgtgactggcaaagactcatcaacaacaactggggattccgacccaagagactcaacttcaagctctttaacattcaagtcaaagaggtcacgcagaatgacggtacgacgacgattgccaataaccttaccagcacggttcaggtgtttactgactcggagtaccagctcccgtacgtcctcggctcggcgcatcaaggatgcctcccgccgttcccagcagacgtcttcatggtgccacagtatggatacctcaccctgaacaacgggagtcaggcagtaggacgctcttcattttactgcctggagtactttccttctcagatgctgcgtaccggaaacaactttaccttcagctacacttttgaggacgttcctttccacagcagctacgctcacagccagagtctggaccgtctcatgaatcctctcatcgaccagtacctgtattacttgagcagaacaaacactccaagtggaaccaccacgcagtcaaggcttcagttttctcaggccggagcgagtgacattcgggaccagtctaggaactggcttcctggaccctgttaccgccagcagcgagtatcaaagacatctgcggataacaacaacagtgaatactcgtggactggagctaccaagtaccacctcaatggcagagactctctggtgaatccgggcccggccatggcaagccacaaggacgatgaagaaaagttttttcctcagagcggggttctcatctttgggaagcaaggctcagagaaaacaaatgtggacattgaaaaggtcatgattacagacgaagaggaaatcaggacaaccaatcccgtggctacggagcagtatggttctgtatctaccaacctccagagaggcaacagacaagcagctaccgcagatgtcaacacacaaggcgttcttccaggcatggtctggcaggacagagatgtgtaccttcaggggcccatctgggcaaagattccacacacggacggacattttcacccctctcccctcatgggtggattcggacttaaacaccctcctccacagattctcatcaagaacaccccggtacctgcgaatccttcgaccaccttcagtgcggcaaagtttgcttccttcatcacacagtactccacgggacaggtcagcgtggagatcgagtgggagctgcagaaggaaaacagcaaacgctggaatcccgaaattcagtacacttccaactacaacaagtctgttaatgtggactttactgtggacactaatggcgtgtattcagagcctcgccccattggcaccagatacctgactcgtaatctgtaattgcttgttaatcaataaaccgtttaattcgtttcagttgaactttggtctctgcgtatttctttcttatctagtttccatggctacgtagataagtagcatggcgggttaatcattaactacaaggaacccctagtgatggagttggccactccctctctgcgcgctcgctcgctcactgaggccgggcgaccaaaggtcgcccgacgcccgggctttgcccgggcggcctcagtgagcgagcgagcgcgcagagagggagtggccaa

SEQ ID NO: 15 - protein, 725 aa, Adeno-associated virus 5
MAADGYLPDWLEDTLSEGIRQWWKLKPGPPPPKPAERHKDDSRGLVLPGYKYLGPFNGLDKGEPVNEADAAALEHDKAYDRQLDSGDNPYLKYNHADAEFQERLKEDTSFGGNLGRAVFQAKKRVLEPFGLVEEGAKTAPTGKRIDDHFPKRKKARTEEDSKPSTSSDAEAGPSGSQQLQIPAQPASSLGADTMSAGGGGPLGDNNQGADGVGNASGDWHCDSTWMGDRVVTKSTRTWVLPSYNNHQYREIKSGSVDGSNANAYFGYSTPWGYFDFNRFHSHWSPRDWQRLINNYWGFRPRSLRVKIFNIQVKEVTVQDSTTTIANNLTSTVQVFTDDDYQLPYVVGNGTEGCLPAFPPQVFTLPQYGYATLNRDNTENPTERSSFFCLEYFPSKMLRTGNNFEFTYNFEEVPFHSSFAPSQNLFKLANPLVDQYLYRFVSTNNTGGVQFNKNLAGRYANTYKNWFPGPMGRTQGWNLGSGVNRASVSAFATTNRMELEGASYQVPPQPNGMTNNLQGSNTYALENTMIFNSQPANPGTTATYLEGNMLITSESETQPVNRVAYNVGGQMATNNQSSTTAPTTGTYNLQEIVPGSVWMERDVYLQGPIWAKIPETGAHFHPSPAMGGFGLKHPPPMMLIKNTPVPGNITSFSDVPVSSFITQYSTGQVTVEMEWELKKENSKRWNPEIQYTNNYNDPQFVDFAPDSTGEYRTTRPIGTRYLTRPL

SEQ ID NO: 16 - protein, 644 aa, Adeno-associated virus
  MOD_RES (434)..(434): Xaa = any amino acid
KAYDQQLKAGDNPYLRYNHADAEFQERLQEDTSFGGNLGRAVFQAKKRVLEPLGLVETPAKTAPGKKRPVDSPDSTSGIGKKGQQPAKKRLNFGQTGDSESVPDPQPIGEPPAGPSGLGSGTMAAGGGAPMADNNEGADGVGNASGNWHCDSTWLGDRVITTSTRTWALPTYNNHLYKQISSQSAGSTNDNVYFGYSTPWGYFDFNRFHCHFSPRDWQRLINNNWGFRPKKLNFKLFNIQVKEVTTNDGVTTIANNLTSTVQVFSDSEYQLPYVLGSAHQGCLPPFPADVFMIPQYGYLTLNNGSQSVGRSSFYCLEYFPSQMLRTGNNFTFSYTFEDVPFHSSYAHSQSLDRLMNPLIDQYLYYLARTQSNAGGTAGNRELQFYQGGPTTMAEQAKNWLPGPCFRQQRVSKTLDQNNNSNFAWTGATKYHLNXRNSLVNPGVAMATHKDDEERFFPSSGVLIFGKTGAANKTTLENVLMTNEEEIRPTNPVATEEYGIVSSNLQAASTAAQTQVVNNQGALPGMVWQNRDVYLQGPIWAKIPHTDGNFHPSPLMGGFGLKHPPPQILIKNTPVPANPPEVFTPAKFASFITQYSTGQVSVEIEWELQKENSKRWNPEIQYTSNFDKQTGVDFAVDSQGVYSEP

SEQ ID NO: 17 - DNA, 1933 bp, Adeno-associated virus
caaggcctacgaccagcagctcaaagcgggtgacaatccgtacctgcggtataaccacgccgacgccgagtttcaggagtgtcttcaagaagatacgtcttttgggggcaacctcgggcgagcagtcttccaggccaaaaagcgggttctcgaacctcttggtctggttgagacgccagctaagacggcacctggaaagaagcgaccggtagactcgccagactccacctcgggcatcggcaagaaaggccagcagcccgcgaaaaagagactcaactttgggcagactggcgactcagagtcagtccccgaccctcaaccaatcggagaaccaccagcaggcccctctggtctgggatctggtacaatggttgcaggcggtggcgcaccaatggctgacaataacgagggcgccgacggagtgggtaatgcctcaggaaattggcattgcgattccacatggctgggcgacagagtcatcaccaccagcacccgaacctgggccctgcccacctacaacaaccacctctacaagcaaatctccagtcagtcagcagggagcaccaacgataacgtctatttcggctacagcaccccctgggggtattttgacttcaacagattccattgccacttctcaccacgtgactggcagcgacttatcaacaacaactggggattccggcccaagaagctcaacttcaagctcttcaacatccaggtcaaggaggtcacgacgaatgacggtgtcacaaccatcgctaataaccttaccagcacggttcaggtcttttcggactcggaatatcaactgccgtacgtcctcggctccgcgcaccagggctgcctgcctccgttcccggcagacgtgttcatgattccgcagtacggatacctgactctgaacaatggcagccaatcggtaggccgttcctccttctactgcctggagtactttccttctcagatgctgagaacgggcaacaacttcacctttagctacaccttcgaggacgtgcctttccacagcagctacgcgcacagccagagtctggaccggctgatgaatcccctcatcgaccagtacctgtactacttggccagaacacagagcaacgcaggaggtactgctggcaatcgggaactgcagttttatcagggcggacctaccaccatggccgaacaagcaaagaactggctgcccggaccttgcttccggcaacagagagtatccaagacgctggatcaaaataacaacagcaactttgcctggactggtgccacaaaataccatttaaatggaagaaattcattggttaatcccggtgtcgccatggcaacccacaaggacgacgaggaacgcttctccccttcgagcggagttctaatttttggcaaaactggagcagctaataaaactacattagaaaacgtgctcatgacaaatgaagaagaaattcgtcctaccaacccggtagctaccgaggaatacgggattgtaagcagcaacttgcaggcggctagcaccgcagcccagacacaagttgttaacaaccagggagccttacctggcatggtctggcagaaccgggacgtgtacctgcaaggtcccatttgggccaagattcctcacacggacggcaactttcacccgtctcctctaatgggtggctttggactgaaacacccgcctccccagatcctgatcaaaaacacgccggtacctgctaatcctccagaagtgtttactcctgccaagtttgcttccttcatcacgcagtacagcaccgggcaagtcagcgttgagatcgagtgggagctgcagaaagagaacagcaagcgctggaacccagagattcagtacacctccaactttgacaaacagactggagtggactttgctgttgacagccagggtgtttactctgagcct

SEQ ID NO: 18 - protein, 644 aa, Adeno-associated virus
KAYDQQLKAGDNPYLRYNHADAEFQECLQEDTSFGGNLGRAVFQAKKRVLEPLGLVETPAKTAPGKKRPVDSPDSTSGIGKKGQQPAKKRLNFGQTGDSESVPDPQPIGEPPAGPSGLGSGTMVAGGGAPMADNNEGADGVGNASGNWHCDSTWLGDRVITTSTRTWALPTYNNHLYKQISSQSAGSTNDNVYFGYSTPWGYFDFNRFHCHFSPRDWQRLINNNWGFRPKKLNFKLFNIQVKEVTTNDGVTTIANNLTSTVQVFSDSEYQLPYVLGSAHQGCLPPFPADVFMIPQYGYLTLNNGSQSVGRSSFYCLEYFPSQMLRTGNNFTFSYTFEDVPFHSSYAHSQSLDRLMNPLIDQYLYYLARTQSNAGGTAGNRELQFYQGGPTTMAEQAKNWLPGPCFRQQRVSKTLDQNNNSNFAWTGATKYHLNGRNSLVNPGVAMATHKDDEERFSPSSGVLIFGKTGAANKTTLENVLMTNEEEIRPTNPVATEEYGIVSSNLQAASTAAQTQVVNNQGALPGMVWQNRDVYLQGPIWAKIPHTDGNFHPSPLMGGFGLKHPPPQILIKNTPVPANPPEVFTPAKFASFITQYSTGQVSVEIEWELQKENSKRWNPEIQYTSNFDKQTGVDFAVDSQGVYSEP

SEQ ID NO: 19 - DNA, 1933 bp, Adeno-associated virus
caaggcctacgaccagcagctcaaagcgggtgacaatccgtacctgcggtataaccacgccgacgccgagtttcaggagcgtcttcaagaagatacgtcttttgggggcaacctcgggcgagcagtcttccaggccaaaaagcgggttctcgaacctcttggtctggttgagacgccagctaagacggcacctggaaagaagcgaccggtagactcgccagactccacctcgggcatcggcaagaaaggccagcagcccgcgaaaaagagactcaactttgggcagactggcgactcagagccagtccccgaccctcaaccaatcggagaaccaccagcaggcccctctggtctgggatctggtacaatggctgcaggcggtggcgcaccaatggctgacaataacgagggcgccgacggagtgggtaatgcctcaggaaattggcattgcgattccacacggctgggcgacagagtcatcaccaccagcacccgaacctgggccctgcccacctacaacaaccacctctacaagcaaatctccagtcagtcagcagggagcaccaacgataacgtctatttcggctacagcaccccctgggggtattttgacttcaacagattccattgccacttctcaccacgtgactggcagcgacttatcaacaacaactggggattccggcccaagaagctcaacttcaagctcttcaacatccaggtcaaggaggtcacgacgaatgacggcgtcacaaccatcgctaataaccttaccagcacggttcaggtcttttcggactcggaatatcaactgccgtacgtcctcggctccgcgcaccagggctgcctgcctccgttcccggcagacgtgttcatgattccgcagtacggatacctgactctgaacaatggcagccaatcggtaggccgttcctccttctactgcctggagtactttccttctcagatgctgagaacgggcaacaacttcacctttagctacaccttcgaggacgtgcctttccacagcagctacgcgcacagccagagtctgggccggctgatgaatcccctcatcgaccagtacctgtactacttggccagaacacagagcaacgcaggaggtactgctggcaatcgggaactgcagttttatcagggcggacctaccaccatggccgaacaagcaaagaactggctgcccggaccttgcttccggcaacagagagtatccaagacgctggatcaaaataacaacagcaactttgcctggactggtgccacaaaataccatttaaatggaagaaattcattggttaatcccggtgtcgccatggcaacccacaaggacgacgaggaacgcttcttcccttcgagcggagttctaatttttggcaaaactggagcagctaataaaactacattagaaaacgtgctcatgacaaatgaagaagaaattcgtcctaccaacccggtagctaccgaggaatacgggattgtaagcagcaacttgcaggcggctagcaccgcagcccagacacaagttgttaacaaccagggagccttacctggcatggtctggcagaaccgggacgtgtacctgcaaggtcccatttgggccaagattcctcacacggacggcaactttcacccgtctcctctaatgggtggctttggactgaaacacccgcctccccagatcctgatcaaaaacacaccggtacctgctaatcctccagaagtgtttactcctgccaagtttgcttccttcatcacgcagtacagcaccgggcaagtcagcgttgagatcgaatgggagctgcagaaagagaacagcaagcgctggaacccagagattcagtacacctccaactttgacaaacagactggagtggactttgctgttgacagccagggtgtttactctgagcct

SEQ ID NO: 20 - protein, 644 aa, Adeno-associated virus
KAYDQQLKAGDNPYLRYNHADAEFQERLQEDTSFGGNLGRAVFQAKKRVLEPLGLVETPAKTAPGKKRPVDSPDSTSGIGKKGQQPAKKRLNFGQTGDSEPVPDPQPIGEPPAGPSGLGSGTMAAGGGAPMADNNEGADGVGNASGNWHCDSTRLGDRVITTSTRTWALPTYNNHLYKQISSQSAGSTNDNVYFGYSTPWGYFDFNRFHCHFSPRDWQRLINNNWGFRPKKLNFKLFNIQVKEVTTNDGVTTIANNLTSTVQVFSDSEYQLPYVLGSAHQGCLPPFPADVFMIPQYGYLTLNNGSQSVGRSSFYCLEYFPSQMLRTGNNFTFSYTFEDVPFHSSYAHSQSLGRLMNPLIDQYLYYLARTQSNAGGTAGNRELQFYQGGPTTMAEQAKNWLPGPCFRQQRVSKTLDQNNNSNFAWTGATKYHLNGRNSLVNPGVAMATHKDDEERFFPSSGVLIFGKTGAANKTTLENVLMTNEEEIRPTNPVATEEYGIVSSNLQAASTAAQTQVVNNQGALPGMVWQNRDVYLQGPIWAKIPHTDGNFHPSPLMGGFGLKHPPPQILIKNTPVPANPPEVFTPAKFASFITQYSTGQVSVEIEWELQKENSKRWNPEIQYTSNFDKQTGVDFAVDSQGVYSEP

SEQ ID NO: 21 - DNA, 1933 bp, Adeno-associated virus; identical to SEQ ID NO: 19

SEQ ID NO: 22 - protein, 644 aa, Adeno-associated virus; identical to SEQ ID NO: 20

SEQ ID NO: 23 - DNA, 1933 bp, Adeno-associated virus
caaggcctacgaccagcagctcaaagcgggtgacaatccgtacctgcggtataaccacgccgacgccgagtttcaggagcgtcttcaagaagatacgtcttttgggggcaacctcgggcgagcagtcttccaggccaaaaagcgggttctcgaacctcttggtctggttgagacgccagctaagacggcacctggaaagaagcgaccggtagactcgccagactccacctcgggcatcggcaagaaaggccagcagcccgcgaaaaagagactcaactttgggcagactggcgactcagagtcagtccccgaccctcaaccaatcggagaaccaccagcaggcccctctggtctgggatctggtacaatggctgcaggcggtggcgcaccaatggctgacaatagcgagggcgccgacggagtgggtaatgcctcaggaaattggcattgcgattccacatggctgggcgacagagtcatcaccaccagcacccgaacctgggccctgcccacctacaacaaccacctctacaagcaaatctccagtcagtcagcagggagcaccaacgataacgtctatttcggctacagcaccccctgggggtattttgacttcaacagattccattgccacttctcaccacgtgactggcagcgacttatcaacaacaactggggattccggcccaagaagctcaacttcaagctcttcaacatccaggtcaaggaggtcacgacgaatgacggtgtcacaaccatcgctaataaccttaccagcacggttcaggtcttttcggactcggaatatcaactgccgtacgtcctcggctccgcgcaccagggctgcctgcctccgttcccggcagacgtgttcatgattccgcagtacggatacctgactctgaacaatggcagccaatcggtaggccgttcctccttctactgcctggagtactttccttctcagatgctgagaacgggcaacaacttcacctttagctacaccttcgaggacgtgcctttccacagcagctacgcgcacagccagagtctggaccggctgatgaatcccctcatcgaccagtacctgtactacttggccagaacacagagcaacgcaggaggtactgctggcaatcgggaactgcagttttatcagggcggacctaccaccatggccgaacaagcaaagaactggctgcccggaccttgcttccggcaacagagagtatccaagacgctggatcaaaataacaacagcaactttgcctggactggtgccacaaaataccatttaaatggaagaaattcattggttaatcccggtgtcgccatggcaacccacaaggacgacgaggaacgcttcttcccttcgagcggagttctaatttttggcaaaactggagcagctaataaaactacattagaaaacgtgctcatgacaaatgaagaagaaattcgtcctaccaacccggtagctaccgaggaatacgggattgtaagcagcaacttgcaggcggctagcaccgcagcccagacacaagttgttaacaaccagggagccttacctggcatggtctggcagaaccgggacgtgtacctgcaaggtcccatttgggccaagattcctcacacggacggcaactttcacccgtctcctctaatgggtggctttggactgaaacacccgcctccccagatcctgatcaaaaacacaccggtacctgctaatcctccagaagtgtttactcctgccaagcttgcttccttcatcacgcagtacagcaccgggcaagtcagcgttgagatcgagtgggagctgcagaaagagaacagcaagcgctggaacccagagattcagtacacctccaactttgacaaacagactggagtggactttgctgttgacagccagggtgtttactctgagcct

SEQ ID NO: 24 - protein, 644 aa, Adeno-associated virus
KAYDQQLKAGDNPYLRYNHADAEFQERLQEDTSFGGNLGRAVFQAKKRVLEPLGLVETPAKTAPGKKRPVDSPDSTSGIGKKGQQPAKKRLNFGQTGDSESVPDPQPIGEPPAGPSGLGSGTMAAGGGAPMADNSEGADGVGNASGNWHCDSTWLGDRVITTSTRTWALPTYNNHLYKQISSQSAGSTNDNVYFGYSTPWGYFDFNRFHCHFSPRDWQRLINNNWGFRPKKLNFKLFNIQVKEVTTNDGVTTIANNLTSTVQVFSDSEYQLPYVLGSAHQGCLPPFPADVFMIPQYGYLTLNNGSQSVGRSSFYCLEYFPSQMLRTGNNFTFSYTFEDVPFHSSYAHSQSLDRLMNPLIDQYLYYLARTQSNAGGTAGNRELQFYQGGPTTMAEQAKNWLPGPCFRQQRVSKTLDQNNNSNFAWTGATKYHLNGRNSLVNPGVAMATHKDDEERFFPSSGVLIFGKTGAANKTTLENVLMTNEEEIRPTNPVATEEYGIVSSNLQAASTAAQTQVVNNQGALPGMVWQNRDVYLQGPIWAKIPHTDGNFHPSPLMGGFGLKHPPPQILIKNTPVPANPPEVFTPAKLASFITQYSTGQVSVEIEWELQKENSKRWNPEIQYTSNFDKQTGVDFAVDSQGVYSEP

SEQ ID NO: 25 - DNA, 1933 bp, Adeno-associated virus
caaggcctacgaccagcagctcaaagcgggtgacaatccgtacctgcggtataaccacgccgacgccgagtttcaggagcgtcttcaagaagatacgtcttttgggggcaacctcgggcgagcagtcttccaggccaaaaagcgggttctcgaacctcttggtctggttgagacgccagctaagacggcacctggaaagaagcgaccggtagactcgccagactccacctcgggcatcggcaagaaaggccagcagcccgcgaaaaagagactcaactttgggcagactggcgactcagagtcagtccccgaccctcaaccaatcggagaaccaccagcaggcccctctggtctgggatctggtacaatggctgcaggcggtggcgcaccaatggctgacaataacgagggcgccgacggagtgggtaatgcctcaggaaattggcattgcgattccacatggctgggcgacagagtcatcaccaccagcacccgaacctgggccctgcccacctacaacaaccacctctacaagcaaatctccagtcagtcagcagggagcaccaacgataacgtctatttcggctacagcaccccctgggggtattttgacttcaacagattccattgccacttctcaccacgtgactggcagcgacttatcaacaacaactggggattccggcccaagaagctcaacttcaagctcttcaacatccaggtcaaggaggtcacgacgaatgacggcgtcacaaccatcgctaataaccttaccagcacggttcaggtcttttcggacccggaatatcaactgccgtacgtcctcggctccgcgcaccagggctgcctgcctccgttcccggcagacgtgttcatgattccgcagtacggatacctgactctgaacaatggcagccaatcggtaggccgttcctccttctactgcctggagtactttccttctcagatgctgagaacgggcaacaacttcacctttagctacaccttcgaggacgtgcctttccacagcagctacgcgcacagccagagtctggaccggctgatgaatcccctcatcgaccagtacctgtactacttggccagaacacagagcaacgcaggaggtactgctggcaatcgggaactgcagttttatcagggcggacctaccaccatggccgaacaagcaaagaactggctgcccggaccttgcttccggcaacagagagtatccaagacgctggatcaaaataacaacagcaactttgcctggactggtgccacaaaataccatttaaatggaagaaattcattggttaatcccggtgtcgccatggcaacccacaaggacgacgaggaacgcttcttcccttcgagcggagttctaatttttggcaaaactggagcagctaataaaactacattagaaaacgtgctcatgacaaatgaagaagaaattcgtcctaccaacccggtagctaccgaggaatacgggattgtaagcagcaacttgcaggcggctagcaccgcagcccagacacaagttgttaacaaccagggagccttacctggcatggtctggcagaaccgggacgtgtacctgcaaggtcccatttgggccaagattcctcacacggacggcaactttcacccgtctcctctaatgggtggctttggactgaaacacccgcctccccagatcctgatcaaaaacacaccggtacctgctaatcctccagaagtgtttactcctgccaagattgcttccttcatcacgcagtacagcaccgggcaagtcagcgttgagatcgagtgggagctgcagaaagagaacagcaagcgctggaacccagagattcagtacacctccaactttgacaaacagactggagtggactttgctgttgacagccagggtgtttactctgagcct

SEQ ID NO: 26 - protein, 644 aa, Adeno-associated virus
KAYDQQLKAGDNPYLRYNHADAEFQERLQEDTSFGGNLGRAVFQAKKRVLEPLGLVETPAKTAPGKKRPVDSPDSTSGIGKKGQQPAKKRLNFGQTGDSESVPDPQPIGEPPAGPSGLGSGTMAAGGGAPMADNNEGADGVGNASGNWHCDSTWLGDRVITTSTRTWALPTYNNHLYKQISSQSAGSTNDNVYFGYSTPWGYFDFNRFHCHFSPRDWQRLINNNWGFRPKKLNFKLFNIQVKEVTTNDGVTTIANNLTSTVQVFSDPEYQLPYVLGSAHQGCLPPFPADVFMIPQYGYLTLNNGSQSVGRSSFYCLEYFPSQMLRTGNNFTFSYTFEDVPFHSSYAHSQSLDRLMNPLIDQYLYYLARTQSNAGGTAGNRELQFYQGGPTTMAEQAKNWLPGPCFRQQRVSKTLDQNNNSNFAWTGATKYHLNGRNSLVNPGVAMATHKDDEERFFPSSGVLIFGKTGAANKTTLENVLMTNEEEIRPTNPVATEEYGIVSSNLQAASTAAQTQVVNNQGALPGMVWQNRDVYLQGPIWAKIPHTDGNFHPSPLMGGFGLKHPPPQILIKNTPVPANPPEVFTPAKIASFITQYSTGQVSVEIEWELQKENSKRWNPEIQYTSNFDKQTGVDFAVDSQGVYSEP

SEQ ID NO: 27 - protein, 738 aa, Adeno-associated virus
MAADGYLPDWLEDNLSEGIREWWALKPGAPKPKANQQKQDDGRGLVLPGYKYLGPFNGLDKGEPVNAADAAALEHDKAYDQQLKAGDNPYLRYNHADAEFQERLQEDTSFGGNLGRAVFQAKKRVLEPLGLVEEGAKTAPGKKRPVEPSPQRSPDSTTGIGKKGQQPAKKRLNFGQTGDSESVPDPQPIGEPPAGPSGLGSGTMAAGGGAPMADNNEGADGVGSSSGNWHCDSTWLGDRVITTSTRTWALPTYNNHLYKQISNGTSGGSTNDNTYFGYSTPWGYFDFNRFHCHFSPRDWQRLINNNWGFRPKRLNFKLFNIQVKEVTQNEGTKTIANNLTSTIQVFTDSEYQLPYVLGSARQGCLPPFPADVFMIPQYGYLTLNNGSQAVGRSSFYCLEYFPSQMLRTGNNFEFSYQFEDVPFHSSYAHSQSLDRLMNPLIDQYLYYLSRTQSTGGTAGTQQLLFSQAGPNNMSAQAKNWLPGPCYRQQRVSTTLSQNNNSNFAWTGATKYHLNGRDSLVNPGVAMATHKDDEERFFPSSGVLMFGKQGAGKGNVDYSSVMLTSEEEIKTTNPVATEQYGVVADNLQQQNAAPIVGAVNSQGALPGMVWQNRDVYLQGPIWAKIPHTDGNFHPSPLMGGFGLKHPPPQILIKNTPVPADPPTTFSQAKLASFITQYSTGQVSVEIEWELQKENSKRWNPEIQYTSNYYKSTNVDFAVNTDGTYSEPRPIGTRYLTRNL

SEQ ID NO: 28 - DNA, 3121 bp, Adeno-associated virus
gaattcgcccttctacggctgcgtcaactggaccaatgagaactttcccttcaacgactgtgtcgacaagatggtgatctggtgggaggaggggaagatgaccgccaaggtcgtggagtcggccaaagccattctcggaggaagcaaggtgcgcgtggaccagaaatgcaagtcctcggcccagatagacccgactcccgtgatcgtcacctccaacaccaacatgtgcgccgtgattgacgggaactcaacgaccttcgaacaccagcagccgttgcaagaccggatgttcaaatttgaactcacccgccgtctggatcatgactttgggaaggtcaccaagcaggaagtcaaagactttttccggtgggcaaaggatcacgtggttgaggtggagcacgaattctacgtcaaaaagggtggagccaagaaaagacccgcccccagtgacgcagatataagtgagcccaaacgggtgcgcgagtcagttgcgcagccatcgacgtcagacgcggaagcttcgatcaactacgcagacaggtaccaaaacaaatgttctcgtcacgcgggcatgaatctgatgctgtttccctgcagacaatgcgagagaatgaatcagaattcaaatatctgcttcactcacggacagaaagactgtttagagtgctttcccgtgtcagaatctcaacccgtttctgtcgtcaaaaaggcgtatcagaaactgtgctacattcatcatatcatgggaaaggtgccagacgcttgcactgcctgcgatctggtcgatgtggatttggatgactgcatctttgaacaataaatgatttaaatcaggtatggctgccgatggttatcttccagattggctcgaggacaacctctctgagggcattcgcgagtggtgggcgctgaaacctggagccccgaagcccaaagccaaccagcaaaagcaggacggcggccggggtctggtgcttcctggctacaagtacctcggacccttcaacggactcgacaagggggagcccgtcaacgcggcggacgcagcggccctcgagcacgacaaggcctacgaccagcagctcaaagcgggtgacaatccgtacctgcggtataaccacgccgacgccgagtttcaggagcgtctgcaagaagatacgtcttttgggggcaacctcgggcgagcagtcttccaggccaagaagcgggttctcgaacctctcggtctggttgaggaaggcgctaagacggctcctggaaagaagagaccggtagagccatcaccccagcgttctccagactcctctacgggcatcggcaagaaaggccagcagcccgcgaaaaagagactcaactttgggcagactggcgactcagagtcagtgcccgaccctcaaccaatcggagaaccccccgcaggcccctctggtctgggatctggtacaatggctgcaggcggtggcgctccaatggcagacaataacgaaggcgccgacggagtgggtagttcctcaggaaattggcattgcgattccacatggctgggcgactgagtcatcaccaccagcacccgaacctgggccctccccacctacaacaaccacctctacaagcaaatctccaacgggacttcgggaggaagcaccaacgacaacacctacttcggctacagcaccccctgggggtattttgactttaacagattccactgccacttctcaccacgtgactggcagcgactcatcaacaacaactggggattccggcccaagagactcaacttcaagctcttcaacatccaggtcaaggaggtcacgcagaatgaaggcaccaagaccatcgccaataaccttaccagcacgattcaggtctttacggactcggaataccagctcccgtacgtcctcggctctgcgcaccagggctgcctgcctccgttcccggcggacgtcttcatgattcctcagtacgggtacctgactctgaacaatggcagtcaggccgtgggccgttcctccttctactgcctggagtactttccttctcaaatgctgagaacgggcaacaactttgagttcagctaccagtttgaggacgtgccttttcacagcagctacgcgcacagccaaagcctggaccggctgatgaaccccctcatcgaccagtacctgtactacctgtctcggactcagtccacgggaggtaccgcaggaactcagcagttgctattttctcaggccgggcctaataacatgtcggctcaggccaaaaactggctacccgggccctgctaccggcagtaacgcgtctccacgacactgtcgcaaaataacaacagcaactttgtctggaccggtgccaccaagtatcatctgaatggcagagactctctggtagatcccggtgtcgctatggcaacccacaaggacgacgaagagcgattttttccgtccagcggagtcataatgtttgggaaacagggagctggaaaagacaacgtggactatagcagcgtcatgctaaccagtgaggaagaaattaaaaccaccaacccagtggccacagaacagtacggcgtggtggccgataacctgcaacagcaaaacgccgctcctattgtaggggccgtcaacagtcaaggagccttacctggcatggtctggcagaaccgggacgtgtacctgcagggtcctacctgggccaagattcctcacacggacggaaactttcatccctcgccgctgatgggaggctttggactgaaacacccgcctcctcagatcctgattaagaatacacctgttcccgcggatcctccaactaccttcagtcaagctaagctggcgtcgttcatcacgcagtacagcaccggacaggtcagcgtggaaattgaatgggagctgcaggaagaaaacagcaaacgctggaacccagagattcaatacacttccaactactacaaatctacaaatgtggactttgctgttaacacagatggcacttattctgagcctcgccccatcggcacccgttacctcacccgtaatctgtaattgcttgttaatcaataaaccggttgattcgtttcagttgaactttggtctctgcgaagggcgaattc

SEQ ID NO: 29 - protein, 738 aa, Adeno-associated virus
MAADGYLPDWLEDNLSEGIREWWALKPGAPKPKANQQKQDDGRGLVLPGYKYLGPFNGLDKGEPVNAADAAALEHDKAYDQQLKAGDNPYLRYNHADAEFQERLQEDTSFGGNLGRAVFQAKKRVLEPLGLVEEGAKTAPGKKRPVEPSPQRSPDSSTGIGKKGQQPAKKRLNFGQTGDSESVPDPQPIGEPPAGPSGLGSGTMAAGGGAPMADNNEGADGVGSSSGNWHCDSTWLGDGVITTSTRTWALPTYNNHLYKQISNGTSGGSTNDNTYFGYSTPWGYFDFNRFHCHFSPRDWQRLINNNWGFRPKSLNFKLFNIQVKEVTQNEGTKTIANNLTSTIQVFTDSEYQLPYVLGSAHQGCLPPFPADVFMIPQYGYLTLNNGSQAVGRSSFYCLEYFPSQMLRTGNNFEFSYQFEDVPFHSSYAHSQSLDRLMNPLIDQYLYYLSRTQSTGGTAGTQQLLFSQAGPNNMSAQAKNWLPGPCYRQQRVSTTLSQNDNSNFAWTGATKYHLNGRDSLVNPGVAMATHKDDEERFFPSSGVLMFGKQGAGKDNVDYSSVMLTSEEEIKTTNPVATEQYGVVADNLQQQNAAPIVGAVNSQGALPGMVWQNRDVYLQGPIWAKIPHTDGNFHPSPLMGGFGLKHPPPQILIKNTPVPADPPTTFSQAKLASFITQYSTGQVSVEIEWELQKENSKRWNPEIQYTSNYYKSTNVDFAVNTDGTYSEPRPIGTRYLTRNL

SEQ ID NO: 30 - DNA, 3121 bp, Adeno-associated virus
gaattcgcccttcgcgagaccaaagttcaactgaaacgaatcaaccggtttattgattaacaagcaattacagattacgggtgaggtaacgggtgccgatggggcgaggctcagaataagtgccatctgtgttaacagcaaagtccacatttgtagatttgtagtagttggaagtgtattgaatctctgggttccagcgtttgctgttttctttctgcagctcccattcaatttccacgctgacctgtccggtgctgtactgcgtgatgaacgacgccagcttagcttgactgaaggtagttggaggatccgcgggaacaggtgtattcttaatcaggatctgaggaggcgggtgtttcagtccaaagcctcccatcagcggcgagggatgaaagtttccgtccgtgtgaggaatcttggcccagataggaccctgcaggtacacgtcccggttctgccagaccatgccaggtaaggctccttgactgttgacggcccctacaataggagcggcgttttgctgttgcaggttatcggccaccacgccgtactgttctgtggccactgggttggtggttttaatttcttcctcactggttagcataacgctgctatagtccacgttgtcttttccagctccctgtttcccaaacattaagactccgctggacggaaaaaatcgctcttcgtcgtccttgtgggttgccatagcgacaccgggatttaccagagagtctctgccattcagatgatacttggtggcaccggtccaggcaaagttgctgttgtcattttgcgacagtgtcgtggagacgcgttgctgccggtagcagggcccgggtagccagtttttggcctgagccgacatgttattaggcccggcctgagaaaatagcaactgctgagttcctgcggtacctcccgtggactgagtccgagacaggtagtacaggtactggtcgatgagggggttcatcagccggtccaggctttggctgtgcgcgtagctgctgtgaaaaggcacgtcctcaaactggtagctgaactcaaagttgttgcccgttctcagcatttgagaaggaaagtactccaggcagtagaaggaggaacggcccacggcctgactgccattgttcagagtcaggtacccgtactgaggaatcatgaagacgtccgccgggaacggaggcaggcagccctggtgcgcagagccgaggacgtacgggagctggtattccgagtccgtaaagacctgaatcgtgctggtaaggttattggcgatggtcttggtgccttcattctgcgtgacctccttgacctggatgttgaagagcttgaagttgaggctcttgggccggaatccccagttgttgttgatgagtcgctgccagtcacgtggtgagaagtggcagtggaatctgttaaagtcaaaatacccccagggggtgctgtagccgaagtaggtgttgtcgttggtgcttcctcccgaagtcccgttggagatttgcttgtagaggtggttgttgtaggtggggagggcccaggttcgggtgctggtggtgatgactccgtcgcccagccatgtggaatcgcaatgccaatttcctgaggaactacccactccgtcggcgccttcgttattgtctgccattggagcgccaccgcctgcagccattgtaccagatcccagaccagaggggcctgcggggggttctccgattggttgagggtcgggcactgactctgagtcgccagtctgcccaaagttgagtctctttttcgcgggctgctggcctttcttgccgatgcccgtagaggagtctggagaacgctggggtgatggctctaccggtctcttctttccaggagccgtcttagcgccttcctcaaccagaccgagaggttcgagaacccgcttcttggcctggaagactgctcgcccgaggttgcccccaaaagacgtatcttcttgcagacgctcctgaaactcggcgtcggcgtggttataccgcaggtacggattgtcacccgctttgagctgctggtcgtaggccttgtcgtgctcgagggccgctgcgtccgccgcgttgacgggctcccccttgtcgagtccgttgaagggtccgaggtacttgtagccaggaagcaccagaccccggccgtcgtcctgcttttgctggttggctttgggcttcggggctccaggtttcagcgcccaccactcgcgaatgccctcagagaggttgtcctcgagccaatctggaagataaccatcggcagccatacctgatttaaatcatttattgttcaaagatgcagtcatccaaatccacattgaccagatcgcaggcagtgcaagcgtctggcacctttcccatgatatgatgaatgtagcacagtttctgatacgcctttttgacgacagaaacgggttgagattctgacacgggaaagcactctaaacagtctttctgtccgtgagtgaagcagatatttgaattctgattcattctctcgcattgtctgcagggaaacagcatcagattcatgcccacgtgacgagaacatttgttttggtacctgtctgcgtagttgatcgaagcttccgcgtctgacgtcgatggctgcgcaactgactcgcgcacccgtttgggctcacttatatctgcgtcactgggggcgggtcttttcttggctccaccctttttgacgtagaattcatgctccacctcaaccacgtgatcctttgcccaccggaaaaagtctttgacttcctgcttggtgaccttcccaaagtcatgatccagacggcgggtgagttcaaatttgaacatccggtcttgcaacggctgctggtgttcgaaggtcgttgagttcccgtcaatcacggcgcacatgttggtgttggaggtgacgatcacgggagtcgggtctatctgggccgaggacttgcatttctggtccacgcgcaccttgcttcctccgagaatggctttggccgactccacgaccttggcggtcatcttcccctcctcccaccagatcaccatcttgtcgacacagtcgttgaagggaaagttctcattggtccagttgacgcagccgtagaaagggcgaattc

SEQ ID NO: 31 - DNA, 2211 bp, Adeno-associated virus
atggctgctgacggttatcttccagattggctcgaggacaacctttctgaaggcattcgtgagtggtgggctctgaaacctggagtccctcaacccaaagcgaaccaacaacaccaggacaaccgtcggggtcttgtgcttccgggttacaaatacctcggacccggtaacggactcgacaaaggagagccggtcaacgaggcggacgcggcagccctcgaacacgacaaagcttacgaccagcagctcaaggccggtgacaacccgtacctcaagtacaaccacgccgacgccgagtttcaggagcgtcttcaagaagatacgtcttttgggggcaaccttggcagagcagtcttccaggccaaaaagaggatccttgagcctcttggtctggttgaggaagcagctaaaacggctcctggaaagaagggggctgtagatcagtctcctcaggaaccggactcatcatctggtgttggcaaatcgggcaaacagcctgccagaaaaagactaaatttcggtcagactggagactcagagtcagtcccagaccctcaacctctcggagaaccaccagcagcccccacaagtttgggatctaatacaatggcttcaggcggtggcgcaccaatggcagacaataacgagggtgccgatggagtgggtaattcctcaggaaattggcattgcgattcccaatggctgggcgacagagtcatcaccaccagcaccagaacctgggccctgcccacttacaacaaccatctctacaagcaaatctccagccaatcaggagcttcaaacgacaaccactactttggctacagcaccccttgggggtattttgactttaacagattccactgccacttctcaccacgtgactggcagcgactcattaacaacaactggggattccggcccaagaaactcagcttcaagctcttcaacatccaagttagaggggtcacgcagaacgatggcacgacgactattgccaataaccttaccagcacggttcaagtgtttacggactcggagtatcagctcccgtacgtgctcgggtcggcgcaccaaggctgtctcccgccgtttccagcggacgtcttcatggtccctcagtatggatacctcaccctgaacaacggaagtcaagcggtgggacgctcatccttttactgcctggagtacttcccttcgcagatgctaaggactggaaataacttccaattcagctataccttcgaggatgtaccttttcacagcagctacgctcacagccagagtttggatcgcttgatgaatcctcttattgatcagtatctgtactacctgaacagaacgcaaggaacaacctctggaacaaccaaccaatcacggctgctttttagccaggctgggcctcagtctatgtctttgcaggccagaaattggctacctgggccctgctaccggcaacagagactttcaaagactgctaacgacaacaacaacagtaactttccttggacagcggccagcaaatatcatctcaatggccgcgactcgctggtgaatccaggaccagctatggccagtcacaaggacgatgaagaaaaatttttccctatgcacggcaatctaatatttggcaaagaagggacaacggcaagtaacgcagaattagataatgtaatgattacggatgaagaagagattcgtaccaccaatcctgtggcaacagagcagtatggaactgtggcaaataacttgcagagctcaaatacagctcccacgactggaactgtcaatcatcagggggccttacctggcatggtgtggcaagatcgtgacgtgtaccttcaaggacctatctgggcaaagattcctcacacggatggacactttcatccttctcctctgatgggaggctttggactgaaacatccgcctcctcaaatcatgatcaaaaatactccggtaccggcaaatcctccgacgactttcagcccggccaagtttgcttcatttatcactcagtactccactggacaggtcagcgtggaaattgagtgggagctacagaaagaaaacagcaaacgttggaatccagagattcagtacacttccaactacaacaagtctgttaatgtggactttactgtagacactaatggtgtttatagtgaacctcgccctattggaacccggtatctcacacgaaacttgtga

SEQ ID NO: 32 - protein, 736 aa, Adeno-associated virus 3
MAADGYLPDWLEDNLSEGIREWWALKPGVPQPKANQQHQDNRRGLVLPGYKYLGPGNGLDKGEPVNEADAAALEHDKAYDQQLKAGDNPYLKYNHADAEFQERLQEDTSFGGNLGRAVFQAKKRILEPLGLVEEAAKTAPGKKGAVDQSPQEPDSSSGVGKSGKQPARKRLNFGQTGDSESVPDPQPLGEPPAAPTSLGSNTMASGGGAPMADNNEGADGVGNSSGNWHCDSQWLGDRVITTSTRTWALPTYNNHLYKQISSQSGASNDNHYFGYSTPWGYFDFNRFHCHFSPRDWQRLINNNWGFRPKKLSFKLFNIQVRGVTQNDGTTTIANNLTSTVQVFTDSEYQLPYVLGSAHQGCLPPFPADVFMVPQYGYLTLNNGSQAVGRSSFYCLEYFPSQMLRTGNNFQFSYTFEDVPFHSSYAHSQSLDRLMNPLIDQYLYYLNRTQGTTSGTTNQSRLLFSQAGPQSMSLQARNWLPGPCYRQQRLSKTANDNNNSNFPWTAASKYHLNGRDSLVNPGPAMASHKDDEEKFFPMHGNLIFGKEGTTASNAELDNVMITDEEEIRTTNPVATEQYGTVANNLQSSNTAPTTGTVNHQGALPGMVWQDRDVYLQGPIWAKIPHTDGHFHPSPLMGGFGLKHPPPQIMIKNTPVPANPPTTFSPAKFASFITQYSTGQVSVEIEWELQKENSKRWNPEIQYTSNYNKSVNVDFTVDTNGVYSEPRPIGTRYLTRNL

SEQ ID NO: 33 - DNA, 4726 bp, Adeno-associated virus 3
ttggccactccctctatgcgcactcgctcgctcggtggggcctggcgaccaaaggtcgccagacggacgtgctttgcacgtccggccccaccgagcgagcgagtgcgcatagagggagtggccaactccatcactagaggtatggcagtgacgtaacgcgaagcgcgcgaagcgagaccacgcctaccagctgcgtcagcagtcaggtgacccttttgcgacagtttgcgacaccacgtggccgctgagggtatatattctcgagtgagcgaaccaggagctccattttgaccgcgaaatttgaacgagcagcagccatgccggggttctacgagattgtcctgaaggtcccgagtgacctggacgagcgcctgccgggcatttctaactcgtttgttaactgggtggccgagaaggaatgggacgtgccgccggattctgacatggatccgaatctgattgagcaggcacccctgaccgtggccgaaaagcttcagcgcgagttcctggtggagtggcgccgcgtgagtaaggccccggaggccctcttttttgtccagttcgaaaagggggagacctacttccacctgcacgtgctgattgagaccatcggggtcaaatccatggtggtcggccgctacgtgagccagattaaagagaagctggtgacccgcatctaccgcggggtcgagccgcagcttccgaactggttcgcggtgaccaaaacgcgaaatggcgccgggggcgggaacaaggtggtggacgactgctacatccccaactacctgctccccaagacccagcccgagctccagtgggcgtggactaacatggaccagtatttaagcgcctgtttgaatctcgcggagcgtaaacggctggtggcgcagcatctgacgcacgtgtcgcagacgcaggagcagaacaaagagaatcagaaccccaattctgacgcgccggtcatcaggtcaaaaacctcagccaggtacatggagctggtcgggtggctggtggaccgcgggatcacgtcagaaaagcaatggattcaggaggaccaggcctcgtacatctccttcaacgccgcctccaactcgcggtcccagatcaaggccgcgctggacaatgcctccaagatcatgagcctgacaaagacggctccggactacctggtgggcagcaacccgccggaggacattaccaaaaatcggatctaccaaatcctggagctgaacgggtacgatccgcagtacgcggcctccgtcttcctgggctgggcgcaaaagaagttcgggaagaggaacaccatctggctctttgggccggccacgacgggtaaaaccaacatcgcggaagccatcgcccacgccgtgcccttctacggctgcgtaaactggaccaatgagaactttcccttcaacgattgcgtcgacaagatggtgatctggtgggaggagggcaagatgacggccaaggtcgtggagagcgccaaggccattctgggcggaagcaaggtgcgcgtggaccaaaagtgcaagtcatcggcccagatcgaacccactcccgtgatcgtcacctccaacaccaacatgtgcgccgtgattgacgggaacagcaccaccttcgagcatcagcagccgctgcaggaccggatgtttgaatttgaacttacccgccgtttggaccatgactttgggaaggtcaccaaacaggaagtaaaggactttttccggtgggcttccgatcacgtgactgacgtggctcatgagttctacgtcagaaagggtggagctaagaaacgccccgcctccaatgacgcggatgtaagcgagccaaaacgggagtgcacgtcacttgcgcagccgacaacgtcagacgcggaagcaccggcggactacgcggacaggtaccaaaacaaatgttctcgtcacgtgggcatgaatctgatgctttttccctgtaaaacatgcgagagaatgaatcaaatttccaatgtctgttttacgcatggtcaaagagactgtggggaatgcttccctggaatgtcagaatctcaacccgtttctgtcgtcaaaaagaagacttatcagaaactgtgtccaattcatcatatcctgggaagggcacccgagattgcctgttcggcctgcgatttggccaatgtggacttggatgactgtgtttctgagcaataaatgacttaaaccaggtatggctgctgacggttatcttccagattggctcgaggacaacctttctgaaggcattcgtgagtggtgggctctgaaacctggagtccctcaacccaaagcgaaccaacaacaccaggacaaccgtcggggtcttgtgcttccgggttacaaatacctcggacccggtaacggactcgacaaaggagagccggtcaacgaggcggacgcggcagccctcgaacacgacaaagcttacgaccagcagctcaaggccggtgacaacccgtacctcaagtacaaccacgccgacgccgagtttcaggagcgtcttcaagaagatacgtcttttgggggcaaccttggcagagcagtcttccaggccaaaaagaggatccttgagcctcttggtctggttgaggaagcagctaaaacggctcctggaaagaagggggctgtagatcagtctcctcaggaaccggactcatcatctggtgttggcaaatcgggcaaacagcctgccagaaaaagactaaatttcggtcagactggagactcagagtcagtcccagaccctcaacctctcggagaaccaccagcagcccccacaagtttgggatctaatacaatggcttcaggcggtggcgcaccaatggcagacaataacgagggtgccgatggagtgggtaattcctcaggaaattggcattgcgattcccaatggctgggcgacagagtcatcaccaccagcaccagaacctgggccctgcccacttacaacaaccatctctacaagcaaatctccagccaatcaggagcttcaaacgacaaccactactttggctacagcaccccttgggggtattttgactttaacagattccactgccacttctcaccacgtgactggcagcgactcattaacaacaactggggattccggcccaagaaactcagcttcaagctcttcaacatccaagttagaggggtcacgcagaacgatggcacgacgactattgccaataaccttaccagcacggttcaagtgtttacggactcggagtatcagctcccgtacgtgctcgggtcggcgcaccaaggctgtctcccgccgtttccagcggacgtcttcatggtccctcagtatggatacctcaccctgaacaacggaagtcaagcggtgggacgctcatccttttactgcctggagtacttcccttcgcagatgctaaggactggaaataacttccaattcagctataccttcgaggatgtaccttttcacagcagctacgctcacagccagagtttggatcgcttgatgaatcctcttattgatcagtatctgtactacctgaacagaacgcaaggaacaacctctggaacaaccaaccaatcacggctgctttttagccaggctgggcctcagtctatgtctttgcaggccagaaattggctacctgggccctgctaccggcaacagagactttcaaagactgctaacgacaacaacaacagtaactttccttggacagcggccagcaaatatcatctcaatggccgcgactcgctggtgaatccaggaccagctatggccagtcacaaggacgatgaagaaaaatttttccctatgcacggcaatctaatatttggcaaagaagggacaacggcaagtaacgcagaattagataatgtaatgattacggatgaagaagagattcgtaccaccaatcctgtggcaacagagcagtatggaactgtggcaaataacttgcagagctcaaatacagctcccacgactggaactgtcaatcatcagggggccttacctggcatggtgtggcaagatcgtgacgtgtaccttcaaggacctatctgggcaaagattcctcacacggatggacactttcatccttctcctctgatgggaggctttggactgaaacatccgcctcctcaaatcatgatcaaaaatactccggtaccggcaaatcctccgacgactttcagcccggccaagtttgcttcatttatcactcagtactccactggacaggtcagcgtggaaattgagtgggagctacagaaagaaaacagcaaacgttggaatccagagattcagtacacttccaactacaacaagtctgttaatgtggactttactgtagacactaatggtgtttatagtgaacctcgccctattggaacccggtatctcacacgaaacttgtgaatcctggttaatcaataaaccgtttaattcgtttcagttgaactttggctcttgtgcacttctttatctttatcttgtttccatggctactgcgtagataagcagcggcctgcggcgcttgcgcttcgcggtttacaactgctggttaatatttaactctcgccatacctctagtgatggagttggccactccctctatgcgcactcgctcgctcggtggggcctggcgaccaaaggtcgccagacggacgtgctttgcacgtccggccccaccgagcgagcgagtgcgcatagagggagtggccaa

SEQ ID NO: 34 - protein, 737 aa, Adeno-associated virus
MAADGYLPDWLEDNLSEGIREWWDLKPGAPKPKANQQKQDNGRGLVLPGYKYLGPFNGLDKGEPVNAADAAALEHDKAYDQQLNAGDNPYLRYNHADAEFQERLQEDTSFGGNLGRAVFQAKKRVLEPLGLVEEGAKTAPAKKRPVEPSPQRSPDSSTGIGKKGQQPARKRLNFGQTGDSESVPDPQPLGEPPAAPSSVGSGTVAAGGGAPMADNNEGADGVGNASGNWHCDSTWLGDRVITTSTRTWALPTYNNHLYEQISSETAGSTNDNTYFGYSTPWGYFDFNRFHCHFSPRDWQRLINNNWGFRPKKLRFKLFNIQVKEVTTNDGVTTIANNLTSTIQVFSDSEYQLPYVLGSAHQGCLPPFPADVFMIPQYGYLTLNNGSQSVGRSSFYCLEYFPSQMLRTGNNFEFSYSFEDVPFHSSYAHSQSLDRLMNPLIDQYLYYLARTQSDPGGTAGNRELQFYQGGPSTMAEQAKNWLPGPCFRQQRVSKTLDQNNNSNFAWTGATKYHLNGRNSLVNPGVAMATHKDDEDRFFPSSGVLIFGKTGATNKTTLENVLMTNEEEIRPTNPVATEEYGIVSSNLQAANTAAQTQVVNNQGALPGMVWQNRDVYLQGPIWAKIPHTDGNFHPSPLMGGFGLKHPPPQILIKNTPVPANPPEVFTPAKFASFITQYSTGQVSVEIEWELQKENSKRWDPEIQYTSNFEKQTGVDFAVDSQGVYSEPRPIGTRYLTRNL

SEQ ID NO: 35 - DNA, 2211 bp, Adeno-associated virus
atggctgctgacggttatcttccagattggctcgaggacaacctttctgaaggcattcgtgagtggtgggctctgaaacctggagtccctcaacccaaagcgaaccaacaacaccaggacaaccgtcggggtcttgtgcttccgggttacaaatacctcggacccggtaacggactcgacaaaggagagccggtcaacgaggcggacgcggcagccctcgaacacgacaaagcttacgaccagcagctcaaggccggtgacaacccgtacctcaagtacaaccacgccgacgccgagtttcaggagcgtcttcaagaagatacgtcttttgggggcaaccttggcagagcagtcttccaggccaaaaagaggatccttgagcctcttggtctggttgaggaagcagctaaaacggctcctggaaagaagggggctgtagatcagtctcctcaggaaccggactcatcatctggtgttggcaaatcgggcaaacagcctgccagaaaaagactaaatttcggtcagactggagactcagagtcagtcccagaccctcaacctctcggagaaccaccagcagcccccacaagtttgggatctaatacaatggcttcaggcggtggcgcaccaatggcagacaataacgagggtgccgatggagtgggtaattcctcaggaaattggcattgcgattcccaatggctgggcgacagagtcatcaccaccagcaccagaacctgggccctgcccacttacaacaaccatctctacaagcaaatctccagccaatcaggagcttcaaacgacaaccactactttggctacagcaccccttgggggtattttgactttaacagattccactgccacttctcaccacgtgactggcagcgactcattaacaacaactggggattccggcccaagaaactcagcttcaagctcttcaacatccaagttagaggggtcacgcagaacgatggcacgacgactattgccaataaccttaccagcacggttcaagtgtttacggactcggagtatcagctcccgtacgtgctcgggtcggcgcaccaaggctgtctcccgccgtttccagcggacgtcttcatggtccctcagtatggatacctcaccctgaacaacggaagtcaagcggtgggacgctcatccttttactgcctggagtacttcccttcgcagatgctaaggactggaaataacttccaattcagctataccttcgaggatgtaccttttcacagcagctacgctcacagccagagtttggatcgcttgatgaatcctcttattgatcagtatctgtactacctgaacagaacgcaaggaacaacctctggaacaaccaaccaatcacggctgctttttagccaggctgggcctcagtctatgtctttgcaggccagaaattggctacctgggccctgctaccggcaacagagactttcaaagactgctaacgacaacaacaacagtaactttccttggacagcggccagcaaatatcatctcaatggccgcgactcgctggtgaatccaggaccagctatggccagtcacaaggacgatgaagaaaaatttttccctatgcacggcaatctaatatttggcaaagaagggacaacggcaagtaacgcagaattagataatgtaatgattacggatgaagaagagattcgtaccaccaatcctgtggcaacagagcagtatggaactgtggcaaataacttgcagagctcaaatacagctcccacgactggaactgtcaatcatcagggggccttacctggcatggtgtggcaagatcgtgacgtgtaccttcaaggacctatctgggcaaagattcctcacacggatggacactttcatccttctcctctgatgggaggctttggactgaaacatccgcctcctcaaatcatgatcaaaaatactccggtaccggcaaatcctccgacgactttcagcccggccaagtttgcttcatttatcactcagtactccactggacaggtcagcgtggaaattgagtgggagctacagaaagaaaacagcaaacgttggaatccagagattcagtacacttccaactacaacaagtctgttaatgtggactttactgtagacactaatggtgtttatagtgaacctcgccctattggaacccggtatctcacacgaaacttgtaa

SEQ ID NO: 36 - protein, 736 aa, Adeno-associated virus; identical to SEQ ID NO: 32

SEQ ID NO: 37 - protein, 736 aa, Adeno-associated virus 3A; identical to SEQ ID NO: 32

SEQ ID NO: 38 - protein, 624 aa, Adeno-associated virus 3A
MPGFYEIVLKVPSDLDERLPGISNSFVNWVAEKEWDVPPDSDMDPNLIEQAPLTVAEKLQREFLVEWRRVSKAPEALFFVQFEKGETYFHLHVLIETIGVKSMVVGRYVSQIKEKLVTRIYRGVEPQLPNWFAVTKTRNGAGGGNKVVDDCYIPNYLLPKTQPELQWAWTNMDQYLSACLNLAERKRLVAQHLTHVSQTQEQNKENQNPNSDAPVIRSKTSARYMELVGWLVDRGITSEKQWIQEDQASYISFNAASNSRSQIKAALDNASKIMSLTKTAPDYLVGSNPPEDITKNRIYQILELNGYDPQYAASVFLGWAQKKFGKRNTIWLFGPATTGKTNIAEAIAHAVPFYGCVNWTNENFPFNDCVDKMVIWWEEGKMTAKVVESAKAILGGSKVRVDQKCKSSAQIEPTPVIVTSNTNMCAVIDGNSTTFEHQQPLQDRMFEFELTRRLDHDFGKVTKQEVKDFFRWASDHVTDVAHEFYVRKGGAKKRPASNDADVSEPKRECTSLAQPTTSDAEAPADYADRYQNKCSRHVGMNLMLFPCKTCERMNQISNVCFTHGQRDCGECFPGMSESQPVSVVKKKTYQKLCPIHHILGRAPEIACSACDLANVDLDDCVSEQ

SEQ ID NO: 39 - protein, 736 aa, Adeno-associated virus 3B
MAADGYLPDWLEDNLSEGIREWWALKPGVPQPKANQQHQDNRRGLVLPGYKYLGPGNGLDKGEPVNEADAAALEHDKAYDQQLKAGDNPYLKYNHADAEFQERLQEDTSFGGNLGRAVFQAKKRILEPLGLVEEAAKTAPGKKRPVDQSPQEPDSSSGVGKSGKQPARKRLNFGQTGDSESVPDPQPLGEPPAAPTSLGSNTMASGGGAPMADNNEGADGVGNSSGNWHCDSQWLGDRVITTSTRTWALPTYNNHLYKQISSQSGASNDNHYFGYSTPWGYFDFNRFHCHFSPRDWQRLINNNWGFRPKKLSFKLFNIQVKEVTQNDGTTTIANNLTSTVQVFTDSEYQLPYVLGSAHQGCLPPFPADVFMVPQYGYLTLNNGSQAVGRSSFYCLEYFPSQMLRTGNNFQFSYTFEDVPFHSSYAHSQSLDRLMNPLIDQYLYYLNRTQGTTSGTTNQSRLLFSQAGPQSMSLQARNWLPGPCYRQQRLSKTANDNNNSNFPWTAASKYHLNGRDSLVNPGPAMASHKDDEEKFFPMHGNLIFGKEGTTASNAELDNVMITDEEEIRTTNPVATEQYGTVANNLQSSNTAPTTRTVNDQGALPGMVWQDRDVYLQGPIWAKIPHTDGHFHPSPLMGGFGLKHPPPQIMIKNTPVPANPPTTFSPAKFASFITQYSTGQVSVEIEWELQKENSKRWNPEIQYTSNYNKSVNVDFTVDTNGVYSEPRPIGTRYLTRNL

SEQ ID NO: 40 - protein, 624 aa, Adeno-associated virus 3B
MPGFYEIVLKVPSDLDEHLPGISNSFVNWVAEKEWELPPDSDMDPNLIEQAPLTVAEKLQREFLVEWRRVSKAPEALFFVQFEKGETYFHLHVLIETIGVKSMVVGRYVSQIKEKLVTRIYRGVEPQLPNWFAVTKTRNGAGGGNKVVDDCYIPNYLLPKTQPELQWAWTNMDQYLSACLNLAERKRLVAQHLTHVSQTQEQNKENQNPNSDAPVIRSKTSARYMELVGWLVDRGITSEKQWIQEDQASYISFNAASNSRSQIKAALDNASKIMSLTKTAPDYLVGSNPPEDITKNRIYQILELNGYDPQYAASVFLGWAQKKFGKRNTIWLFGPATTGKTNIAEAIAHAVPFYGCVNWTNENFPFNDCVDKMVIWWEEGKMTAKVVESAKAILGGSKVRVDQKCKSSAQIEPTPVIVTSNTNMCAVIDGNSTTFEHQQPLQDRMFKFELTRRLDHDFGKVTKQEVKDFFRWASDHVTDVAHEFYVRKGGAKKRPASNDADVSEPKRQCTSLAQPTTSDAEAPADYADRYQNKCSRHVGMNLMLFPCKTCERMNQISNVCFTHGQRDCGECFPGMSESQPVSVVKKKTYQKLCPIHHILGRAPEIACSACDLANVDLDDCVSEQ

SEQ ID NO: 41 - DNA, 4722 bp, Adeno-associated virus 3B
tggccactccctctatgcgcactcgctcgctcggtggggcctggcgaccaaaggtcgccagacggacgtgctttgcacgtccggccccaccgagcgagcgagtgcgcatagagggagtggccaactccatcactagaggtatggcagtgacgtaacgcgaagcgcgcgaagcgagaccacgcctaccagctgcgtcagcagtcaggtgacccttttgcgacagtttgcgacaccacgtggccgctgagggtatatattctcgagtgagcgaaccaggagctccattttgaccgcgaaatttgaacgagcagcagccatgccggggttctacgagattgtcctgaaggtcccgagtgacctggacgagcacctgccgggcatttctaactcgtttgttaactgggtggccgagaaggaatgggagctgccgccggattctgacatggatccgaatctgattgagcaggcacccctgaccgtggccgaaaagcttcagcgcgagttcctggtggagtggcgccgcgtgagtaaggccccggaggccctcttttttgtccagttcgaaaagggggagacctacttccacctgcacgtgctgattgagaccatcggggtcaaatccatggtggtcggccgctacgtgagccagattaaagagaagctggtgacccgcatctaccgcggggtcgagccgcagcttccgaactggttcgcggtgaccaaaacgcgaaatggcgccgggggcgggaacaaggtggtggacgactgctacatccccaactacctgctccccaagacccagcccgagctccagtgggcgtggactaacatggaccagtatttaagcgcctgtttgaatctcgcggagcgtaaacggctggtggcgcagcatctgacgcacgtgtcgcagacgcaggagcagaacaaagagaatcagaaccccaattctgacgcgccggtcatcaggtcaaaaacctcagccaggtacatggagctggtcgggtggctggtggaccgcgggatcacgtcagaaaagcaatggattcaggaggaccaggcctcgtacatctccttcaacgccgcctccaactcgcggtcccagatcaaggccgcgctggacaatgcctccaagatcatgagcctgacaaagacggctccggactacctggtgggcagcaacccgccggaggacattaccaaaaatcggatctaccaaatcctggagctgaacgggtacgatccgcagtacgcggcctccgtcttcctgggctgggcgcaaaagaagttcgggaagaggaacaccatctggctctttgggccggccacgacgggtaaaaccaacatcgcggaagccatcgcccacgccgtgcccttctacggctgcgtaaactggaccaatgagaactttcccttcaacgattgcgtcgacaagatggtgatctggtgggaggagggcaagatgacggccaaggtcgtggagagcgccaaggccattctgggcggaagcaaggtgcgcgtggaccaaaagtgcaagtcatcggcccagatcgaacccactcccgtgatcgtcacctccaacaccaacatgtgcgccgtgattgacgggaacagcaccaccttcgagcatcagcagccgctgcaggaccggatgtttaaatttgaacttacccgccgtttggaccatgactttgggaaggtcaccaaacaggaagtaaaggactttttccggtgggcttccgatcacgtgactgacgtggctcatgagttctacgtcagaaagggtggagctaagaaacgccccgcctccaatgacgcggatgtaagcgagccaaaacggcagtgcacgtcacttgcgcagccgacaacgtcagacgcggaagcaccggcggactacgcggacaggtaccaaaacaaatgttctcgtcacgtgggcatgaatctgatgctttttccctgtaaaacatgcgagagaatgaatcaaatttccaatgtctgttttacgcatggtcaaagagactgtggggaatgcttccctggaatgtcagaatctcaacccgtttctgtcgtcaaaaagaagacttatcagaaactgtgtccaattcatcatatcctgggaagggcacccgagattgcctgttcggcctgcgatttggccaatgtggacttggatgactgtgtttctgagcaataaatgacttaaaccaggtatggctgctgacggttatcttccagattggctcgaggacaacctttctgaaggcattcgtgagtggtgggctctgaaacctggagtccctcaacccaaagcgaaccaacaacaccaggacaaccgtcggggtcttgtgcttccgggttacaaatacctcggacccggtaacggactcgacaaaggagagccggtcaacgaggcggacgcggcagccctcgaacacgacaaagcttacgaccagcagctcaaggccggtgacaacccgtacctcaagtacaaccacgccgacgccgagtttcaggagcgtcttcaagaagatacgtcttttgggggcaaccttggcagagcagtcttccaggccaaaaagaggatccttgagcctcttggtctggttgaggaagcagctaaaacggctcctggaaagaagaggcctgtagatcagtctcctcaggaaccggactcatcatctggtgttggcaaatcgggcaaacagcctgccagaaaaagactaaatttcggtcagactggcgactcagagtcagtcccagaccctcaacctctcggagaaccaccagcagcccccacaagtttgggatctaatacaatggcttcaggcggtggcgcaccaatggcagacaataacgagggtgccgatggagtgggtaattcctcaggaaattggcattgcgattcccaatggctgggcgacagagtcatcaccaccagcaccagaacctgggccctgcccacttacaacaaccatctctacaagcaaatctccagccaatcaggagcttcaaacgacaaccactactttggctacagcaccccttgggggtattttgactttaacagattccactgccacttctcaccacgtgactggcagcgactcattaacaacaactggggattccggcccaagaaactcagcttcaagctcttcaacatccaagttaaagaggtcacgcagaacgatggcacgacgactattgccaataaccttaccagcacggttcaagtgtttacggactcggagtatcagctcccgtacgtgctcgggtcggcgcaccaaggctgtctcccgccgtttccagcggacgtcttcatggtccctcagtatggatacctcaccctgaacaacggaagtcaagcggtgggacgctcatccttttactgcctggagtacttcccttcgcagatgctaaggactggaaataacttccaattcagctataccttcgaggatgtaccttttcacagcagctacgctcacagccagagtttggatcgcttgatgaatcctcttattgatcagtatctgtactacctgaacagaacgcaaggaacaacctctggaacaaccaaccaatcacggctgctttttagccaggctgggcctcagtctatgtctttgcaggccagaaattggctacctgggccctgctaccggcaacagagactttcaaagactgctaacgacaacaacaacagtaactttccttggacagcggccagcaaatatcatctcaatggccgcgactcgctggtgaatccaggaccagctatggccagtcacaaggacgatgaagaaaaatttttccctatgcacggcaatctaatatttggcaaagaagggacaacggcaagtaacgcagaattagataatgtaatgattacggatgaagaagagattcgtaccaccaatcctgtggcaacagagcagtatggaactgtggcaaataacttgcagagctcaaatacagctcccacgactagaactgtcaatgatcagggggccttacctggcatggtgtggcaagatcgtgacgtgtaccttcaaggacctatctgggcaaagattcctcacacggatggacactttcatccttctcctctgatgggaggctttggactgaaacatccgcctcctcaaatcatgatcaaaaatactccggtaccggcaaatcctccgacgactttcagcccggccaagtttgcttcatttatcactcagtactccactggacaggtcagcgtggaaattgagtgggagctacagaaagaaaacagcaaacgttggaatccagagattcagtacacttccaactacaacaagtctgttaatgtggactttactgtagacactaatggtgtttatagtgaacctcgccctattggaacccggtatctcacacgaaacttgtaatcctggttaatcaataaaccgtttaattcgtttcagttgaactttggctcttgtgcacttcttatcttatcttgtttccatggctactgcgtagataagcagcggcctgcggcgcttgcgcttcgcggtttacaactgctggttaatatttaactctcgccatacctctagtgatggagttggccactccctctatgcgcactcgctcgctcggtggggccggacgtgcaaagcacgtccgtctggcgacctttggtcgccaggccccaccgagcgagcgagtgcgcatagagggagtggccaa

SEQ ID NO: 42 - DNA, 1800 bp, Adeno-associated virus 4
  modified_base (342)..(342): n = a, c, t, or g
  misc_feature (342)..(342): n is a, c, g, or t
acggctcctggaaagaagagaccgttgattgaatccccccagcagcccgactcctccacgggtatcggcaaaaaaggcaagcagccggctaaaaagaagctcgttttcgaagacgaaactggagcaggcgacggaccccctgagggatcaacttccggagccatgtctgatgacagtgagatgcgtgcagcagctggcggagctgcagtcgagggsggacaaggtgccgatggagtgggtaatgcctcgggtgattggcattgcgattccacctggtctgagggccacgtcacgaccaccagcaccagaacctgggtcttgcccacctacaacaaccacctntacaagcgactcggagagagcctgcagtccaacacctacaacggattctccaccccctggggatactttgacttcaaccgcttccactgccacttctcaccacgtgactggcagcgactcatcaacaacaactggggcatgcgacccaaagccatgcgggtcaaaatcttcaacatccaggtcaaggaggtcacgacgtcgaacggcgagacaacggtggctaataaccttaccagcacggttcagatctttgcggactcgtcgtacgaactgccgtacgtgatggatgcgggtcaagagggcagcctgcctccttttcccaacgacgtctttatggtgccccagtacggctactgtggactggtgaccggcaacacttcgcagcaacagactgacagaaatgccttctactgcctggagtactttccttcgcagatgctgcggactggcaacaactttgaaattacgtacagttttgagaaggtgcctttccactcgatgtacgcgcacagccagagcctggaccggctgatgaaccctctcatcgaccagtacctgtggggactgcaatcgaccaccaccggaaccaccctgaatgccgggactgccaccaccaactttaccaagctgcggcctaccaacttttccaactttaaaaagaactggctgcccgggccttcaatcaagcagcagggcttctcaaagactgccaatcaaaactacaagatccctgccaccgggtcagacagtctcatcaaatacgagacgcacagcactctggacggaagatggagtgccctgacccccggacctccaatggccacggctggacctgcggacagcaagttcagcaacagccagctcatctttgcggggcctaaacagaacggcaacacggccaccgtacccgggactctgatcttcacctctgaggaggagctggcagccaccaacgccaccgatacggacatgtggggcaacctacctggcggtgaccagagcaacagcaacctgccgaccgtggacagactgacagccttgggagccgtgcctggaatggtctggcaaaacagagacatttactaccagggtcccatttgggccaagattcctcataccgatggacactttcacccctcaccgctgattggtgggtttgggctgaaacacccgcctcctcaaatttttatcaagaacaccccggtacctgcgaatcctgcaacgaccttcagctctactccggtaaactccttcattactcagtacagcactggccaggtgtcggtgcagattgactgggagatccagaaggagcggtccaaacgctggaaccccgaggtccagtttacctccaactacggacagcaaaactctctgttgtgggctcccgatgcggctgggaaatacactgagcctagggctatcggtacccgctacctcacccaccacctgtaataa

SEQ ID NO: 43 - DNA, 2208 bp, Adeno-associated virus 4
  modified_base (750)..(750): n = a, c, t, or g
  misc_feature (750)..(750): n is a, c, g, or t
atgactgacggttaccttccagattggctagaggacaacctctctgaaggcgttcgagagtggtgggcgctgcaacctggagcccctaaacccaaggcaaatcaacaacatcaggacaacgctcggggtcttgtgcttccgggttacaaatacctcggacccggcaacggactcgacaagggggaacccgtcaacgcagcggacgcggcagccctcgagcacgacaaggcctacgaccagcagctcaaggccggtgacaacccctacctcaagtacaaccacgccgacgcggagttccagcagcggcttcagggcgacacatcgtttgggggcaacctcggcagagcagtcttccaggccaaaaagagggttcttgaacctcttggtctggttgagcaagcgggtgagacggctcctggaaagaagagaccgttgattgaatccccccagcagcccgactcctccacgggtatcggcaaaaaaggcaagcagccggctaaaaagaagctcgttttcgaagacgaaactggagcaggcgacggaccccctgagggatcaacttccggagccatgtctgatgacagtgagatgcgtgcagcagctggcggagctgcagtcgagggsggacaaggtgccgatggagtgggtaatgcctcgggtgattggcattgcgattccacctggtctgagggccacgtcacgaccaccagcaccagaacctgggtcttgcccacctacaacaaccacctntacaagcgactcggagagagcctgcagtccaacacctacaacggattctccaccccctggggatactttgacttcaaccgcttccactgccacttctcaccacgtgactggcagcgactcatcaacaacaactggggcatgcgacccaaagccatgcgggtcaaaatcttcaacatccaggtcaaggaggtcacgacgtcgaacggcgagacaacggtggctaataaccttaccagcacggttcagatctttgcggactcgtcgtacgaactgccgtacgtgatggatgcgggtcaagagggcagcctgcctccttttcccaacgacgtctttatggtgccccagtacggctactgtggactggtgaccggcaacacttcgcagcaacagactgacagaaatgccttctactgcctggagtactttccttcgcagatgctgcggactggcaacaactttgaaattacgtacagttttgagaaggtgcctttccactcgatgtacgcgcacagccagagcctggaccggctgatgaaccctctcatcgaccagtacctgtggggactgcaatcgaccaccaccggaaccaccctgaatgccgggactgccaccaccaactttaccaagctgcggcctaccaacttttccaactttaaaaagaactggctgcccgggccttcaatcaagcagcagggcttctcaaagactgccaatcaaaactacaagatccctgccaccgggtcagacagtctcatcaaatacgagacgcacagcactctggacggaagatggagtgccctgacccccggacctccaatggccacggctggacctgcggacagcaagttcagcaacagccagctcatctttgcggggcctaaacagaacggcaacacggccaccgtacccgggactctgatcttcacctctgaggaggagctggcagccaccaacgccaccgatacggacatgtggggcaacctacctggcggtgaccagagcaacagcaacctgccgaccgtggacagactgacagccttgggagccgtgcctggaatggtctggcaaaacagagacatttactaccagggtcccatttgggccaagattcctcataccgatggacactttcacccctcaccgctgattggtgggtttgggctgaaacacccgcctcctcaaatttttatcaagaacaccccggtacctgcgaatcctgcaacgaccttcagctctactccggtaaactccttcattactcagtacagcactggccaggtgtcggtgcagattgactgggagatccagaaggagcggtccaaacgctggaaccccgaggtccagtttacctccaactacggacagcaaaactctctgttgtgggctcccgatgcggctgggaaatacactgagcctagggctatcggtacccgctacctcacccaccacctgtaataa

SEQ ID NO: 44 - DNA, 1872 bp, Adeno-associated virus 4
atgccggggttctacgagatcgtgctgaaggtgcccagcgacctggacgagcacctgcccggcatttctgactcttttgtgagctgggtggccgagaaggaatgggagctgccgccggattctgacatggacttgaatctgattgagcaggcacccctgaccgtggccgaaaagctgcaacgcgagttcctggtcgagtggcgccgcgtgagtaaggccccggaggccctcttctttgtccagttcgagaagggggacagctacttccacctgcacatcctggtggagaccgtgggcgtcaaatccatggtggtgggccgctacgtgagccagattaaagagaagctggtgacccgcatctaccgcggggtcgagccgcagcttccgaactggttcgcggtgaccaagacgcgtaatggcgccggaggcgggaacaaggtggtggacgactgctacatccccaactacctgctccccaagacccagcccgagctccagtgggcgtggactaacatggaccagtatataagcgcctgtttgaatctcgcggagcgtaaacggctggtggcgcagcatctgacgcacgtgtcgcagacgcaggagcagaacaaggaaaaccagaaccccaattctgacgcgccggtcatcaggtcaaaaacctccgccaggtacatggagctggtcgggtggctggtggaccgcgggatcacgtcagaaaagcaatggatccaggaggaccaggcgtcctacatctccttcaacgccgcctccaactcgcggtcacaaatcaaggccgcgctggacaatgcctccaaaatcatgagcctgacaaagacggctccggactacctggtgggccagaacccgccggaggacatttccagcaaccgcatctaccgaatcctcgagatgaacgggtacgatccgcagtacgcggcctccgtcttcctgggctgggcgcaaaagaagttcgggaagaggaacaccatctggctctttgggccggccacgacgggtaaaaccaacatcgcggaagccatcgcccacgccgtgcccttctacggctgcgtgaactggaccaatgagaactttccgttcaacgattgcgtcgacaagatggtgatctggtgggaggagggcaagatgacggccaaggtcgtagagagcgccaaggccatcctgggcggaagcaaggtgcgcgtggaccaaaagtgcaagtcatcggcccagatcgacccaactcccgtgatcgtcacctccaacaccaacatgtgcgcggtcatcgacggaaactcgaccaccttcgagcaccaacaaccactccaggaccggatgttcaagttcgagctcaccaagcgcctggagcacgactttggcaaggtcaccaagcaggaagtcaaagactttttccggtgggcgtcagatcacgtgaccgaggtgactcacgagttttacgtcagaaagggtggagctagaaagaggcccgcccccaatgacgcagatataagtgagcccaagcgggcctgtccgtcagttgcgcagccatcgacgtcagacgcggaagctccggtggactacgcggacaggtaccaaaacaaatgttctcgtcacgtgggtatgaatctgatgctttttccctgccggcaatgcgagagaatgaatcagaatgtggacatttgcttcacgcacggggtcatggactgtgccgagtgcttccccgtgtcagaatctcaacccgtgtctgtcgtcagaaagcggacgtatcagaaactgtgtccgattcatcacatcatggggagggcgcccgaggtggcctgctcggcctgcgaactggccaatgtggacttggatgactgtgacatggaacaataa

SEQ ID NO: 45 - DNA, 1611 bp, Adeno-associated virus 4
atgccggggttctacgagatcgtgctgaaggtgcccagcgacctggacgagcacctgcccggcatttctgactcttttgtgagctgggtggccgagaaggaatgggagctgccgccggattctgacatggacttgaatctgattgagcaggcacccctgaccgtggccgaaaagctgcaacgcgagttcctggtcgagtggcgccgcgtgagtaaggccccggaggccctcttctttgtccagttcgagaagggggacagctacttccacctgcacatcctggtggagaccgtgggcgtcaaatccatggtggtgggccgctacgtgagccagattaaagagaagctggtgacccgcatctaccgcggggtcgagccgcagcttccgaactggttcgcggtgaccaagacgcgtaatggcgccggaggcgggaacaaggtggtggacgactgctacatccccaactacctgctccccaagacccagcccgagctccagtgggcgtggactaacatggaccagtatataagcgcctgtttgaatctcgcggagcgtaaacggctggtggcgcagcatctgacgcacgtgtcgcagacgcaggagcagaacaaggaaaaccagaaccccaattctgacgcgccggtcatcaggtcaaaaacctccgccaggtacatggagctggtcgggtggctggtggaccgcgggatcacgtcagaaaagcaatggatccaggaggaccaggcgtcctacatctccttcaacgccgcctccaactcgcggtcacaaatcaaggccgcgctggacaatgcctccaaaatcatgagcctgacaaagacggctccggactacctggtgggccagaacccgccggaggacatttccagcaaccgcatctaccgaatcctcgagatgaacgggtacgatccgcagtacgcggcctccgtcttcctgggctgggcgcaaaagaagttcgggaagaggaacaccatctggctctttgggccggccacgacgggtaaaaccaacatcgcggaagccatcgcccacgccgtgcccttctacggctgcgtgaactggaccaatgagaactttccgttcaacgattgcgtcgacaagatggtgatctggtgggaggagggcaagatgacggccaaggtcgtagagagcgccaaggccatcctgggcggaagcaaggtgcgcgtggaccaaaagtgcaagtcatcggcccagatcgacccaactcccgtgatcgtcacctccaacaccaacatgtgcgcggtcatcgacggaaactcgaccaccttcgagcaccaacaaccactccaggaccggatgttcaagttcgagctcaccaagcgcctggagcacgactttggcaaggtcaccaagcaggaagtcaaagactttttccggtgggcgtcagatcacgtgaccgaggtgactcacgagttttacgtcagaaagggtggagctagaaagaggcccgcccccaatgacgcagatataagtgagcccaagcgggcctgtccgtcagttgcgcagccatcgacgtcagacgcggaagctccggtggactacgcggacagattggctagaggacaacctctctga

SEQ ID NO: 46 - DNA, 1872 bp, Adeno-associated virus 4; identical to SEQ ID NO: 44

SEQ ID NO: 47 - DNA, 1617 bp, Adeno-associated virus 4
  modified_base (162)..(162): n = a, c, t, or g
  misc_feature (162)..(162): n is a, c, g, or t
atgcgtgcagcagctggcggagctgcagtcgagggsggacaaggtgccgatggagtgggtaatgcctcgggtgattggcattgcgattccacctggtctgagggccacgtcacgaccaccagcaccagaacctgggtcttgcccacctacaacaaccacctntacaagcgactcggagagagcctgcagtccaacacctacaacggattctccaccccctggggatactttgacttcaaccgcttccactgccacttctcaccacgtgactggcagcgactcatcaacaacaactggggcatgcgacccaaagccatgcgggtcaaaatcttcaacatccaggtcaaggaggtcacgacgtcgaacggcgagacaacggtggctaataaccttaccagcacggttcagatctttgcggactcgtcgtacgaactgccgtacgtgatggatgcgggtcaagagggcagcctgcctccttttcccaacgacgtctttatggtgccccagtacggctactgtggactggtgaccggcaacacttcgcagcaacagactgacagaaatgccttctactgcctggagtactttccttcgcagatgctgcggactggcaacaactttgaaattacgtacagttttgagaaggtgcctttccactcgatgtacgcgcacagccagagcctggaccggctgatgaaccctctcatcgaccagtacctgtggggactgcaatcgaccaccaccggaaccaccctgaatgccgggactgccaccaccaactttaccaagctgcggcctaccaacttttccaactttaaaaagaactggctgcccgggccttcaatcaagcagcagggcttctcaaagactgccaatcaaaactacaagatccctgccaccgggtcagacagtctcatcaaatacgagacgcacagcactctggacggaagatggagtgccctgacccccggacctccaatggccacggctggacctgcggacagcaagttcagcaacagccagctcatctttgcggggcctaaacagaacggcaacacggccaccgtacccgggactctgatcttcacctctgaggaggagctggcagccaccaacgccaccgatacggacatgtggggcaacctacctggcggtgaccagagcaacagcaacctgccgaccgtggacagactgacagccttgggagccgtgcctggaatggtctggcaaaacagagacatttactaccagggtcccatttgggccaagattcctcataccgatggacactttcacccctcaccgctgattggtgggtttgggctgaaacacccgcctcctcaaatttttatcaagaacaccccggtacctgcgaatcctgcaacgaccttcagctctactccggtaaactccttcattactcagtacagcactggccaggtgtcggtgcagattgactgggagatccagaaggagcggtccaaacgctggaaccccgaggtccagtttacctccaactacggacagcaaaactctctgttgtgggctcccgatgcggctgggaaatacactgagcctagggctatcggtacccgctacctcacccaccacctgtaa

SEQ ID NO: 48 - DNA, 939 bp, Adeno-associated virus 4
atggagctggtcgggtggctggtggaccgcgggatcacgtcagaaaagcaatggatccaggaggaccaggcgtcctacatctccttcaacgccgcctccaactcgcggtcacaaatcaaggccgcgctggacaatgcctccaaaatcatgagcctgacaaagacggctccggactacctggtgggccagaacccgccggaggacatttccagcaaccgcatctaccgaatcctcgagatgaacgggtacgatccgcagtacgcggcctccgtcttcctgggctgggcgcaaaagaagttcgggaagaggaacaccatctggctctttgggccggccacgacgggtaaaaccaacatcgcggaagccatcgcccacgccgtgcccttctacggctgcgtgaactggaccaatgagaactttccgttcaacgattgcgtcgacaagatggtgatctggtgggaggagggcaagatgacggccaaggtcgtagagagcgccaaggccatcctgggcggaagcaaggtgcgcgtggaccaaaagtgcaagtcatcggcccagatcgacccaactcccgtgatcgtcacctccaacaccaacatgtgcgcggtcatcgacggaaactcgaccaccttcgagcaccaacaaccactccaggaccggatgttcaagttcgagctcaccaagcgcctggagcacgactttggcaaggtcaccaagcaggaagtcaaagactttttccggtgggcgtcagatcacgtgaccgaggtgactcacgagttttacgtcagaaagggtggagctagaaagaggcccgcccccaatgacgcagatataagtgagcccaagcgggcctgtccgtcagttgcgcagccatcgacgtcagacgcggaagctccggtggactacgcggacagattggctagaggacaacctctctga

SEQ ID NO: 49 - DNA, 1197 bp, Adeno-associated virus 4
atggagctggtcgggtggctggtggaccgcgggatcacgtcagaaaagcaatggatccaggaggaccaggcgtcctacatctccttcaacgccgcctccaactcgcggtcacaaatcaaggccgcgctggacaatgcctccaaaatcatgagcctgacaaagacggctccggactacctggtgggccagaacccgccggaggacatttccagcaaccgcatctaccgaatcctcgagatgaacgggtacgatccgcagtacgcggcctccgtcttcctgggctgggcgcaaaagaagttcgggaagaggaacaccatctggctctttgggccggccacgacgggtaaaaccaacatcgcggaagccatcgcccacgccgtgcccttctacggctgcgtgaactggaccaatgagaactttccgttcaacgattgcgtcgacaagatggtgatctggtgggaggagggcaagatgacggccaaggtcgtagagagcgccaaggccatcctgggcggaagcaaggtgcgcgtggaccaaaagtgcaagtcatcggcccagatcgacccaactcccgtgatcgtcacctccaacaccaacatgtgcgcggtcatcgacggaaactcgaccaccttcgagcaccaacaaccactccaggaccggatgttcaagttcgagctcaccaagcgcctggagcacgactttggcaaggtcaccaagcaggaagtcaaagactttttccggtgggcgtcagatcacgtgaccgaggtgactcacgagttttacgtcagaaagggtggagctagaaagaggcccgcccccaatgacgcagatataagtgagcccaagcgggcctgtccgtcagttgcgcagccatcgacgtcagacgcggaagctccggtggactacgcggacaggtaccaaaacaaatgttctcgtcacgtgggtatgaatctgatgctttttccctgccggcaatgcgagagaatgaatcagaatgtggacatttgcttcacgcacggggtcatggactgtgccgagtgcttccccgtgtcagaatctcaacccgtgtctgtcgtcagaaagcggacgtatcagaaactgtgtccgattcatcacatcatggggagggcgcccgaggtggcctgctcggcctgcgaactggccaatgtggacttggatgactgtgacatggaacaa

SEQ ID NO: 50 - DNA, 245 bp, Adeno-associated virus 4
ctccatcatctaggtttgcccactgacgtcaatgtgacgtcctagggttagggaggtccctgtattagcagtcacgtgagtgtcgtatttcgcggagcgtagcggagcgcataccaagctgccacgtcacagccacgtggtccgtttgcgacagtttgcgacaccatgtggtcaggagggtatataaccgcgagtgagccagcgaggagctccattttgcccgcgaattttgaacgagcagcagc

SEQ ID NO: 51 - protein, 313 aa, Adeno-associated virus 4
  MOD_RES (313)..(313): Xaa = any amino acid
MELVGWLVDRGITSEKQWIQEDQASYISFNAASNSRSQIKAALDNASKIMSLTKTAPDYLVGQNPPEDISSNRIYRILEMNGYDPQYAASVFLGWAQKKFGKRNTIWLFGPATTGKTNIAEAIAHAVPFYGCVNWTNENFPFNDCVDKMVIWWEEGKMTAKVVESAKAILGGSKVRVDQKCKSSAQIDPTPVIVTSNTNMCAVIDGNSTTFEHQQPLQDRMFKFELTKRLEHDFGKVTKQEVKDFFRWASDHVTEVTHEFYVRKGGARKRPAPNDADISEPKRACPSVAQPSTSDAEAPVDYADRLARGQPLX

SEQ ID NO: 52 - protein, 399 aa, Adeno-associated virus 4
MELVGWLVDRGITSEKQWIQEDQASYISFNAASNSRSQIKAALDNASKIMSLTKTAPDYLVGQNPPEDISSNRIYRILEMNGYDPQYAASVFLGWAQKKFGKRNTIWLFGPATTGKTNIAEAIAHAVPFYGCVNWTNENFPFNDCVDKMVIWWEEGKMTAKVVESAKAILGGSKVRVDQKCKSSAQIDPTPVIVTSNTNMCAVIDGNSTTFEHQQPLQDRMFKFELTKRLEHDFGKVTKQEVKDFFRWASDHVTEVTHEFYVRKGGARKRPAPNDADISEPKRACPSVAQPSTSDAEAPVDYADRYQNKCSRHVGMNLMLFPCRQCERMNQNVDICFTHGVMDCAECFPVSESQPVSVVRKRTYQKLCPIHHIMGRAPEVACSACELANVDLDDCDMEQ

SEQ ID NO: 53 - protein, 623 aa, Adeno-associated virus 4
MPGFYEIVLKVPSDLDEHLPGISDSFVSWVAEKEWELPPDSDMDLNLIEQAPLTVAEKLQREFLVEWRRVSKAPEALFFVQFEKGDSYFHLHILVETVGVKSMVVGRYVSQIKEKLVTRIYRGVEPQLPNWFAVTKTRNGAGGGNKVVDDCYIPNYLLPKTQPELQWAWTNMDQYISACLNLAERKRLVAQHLTHVSQTQEQNKENQNPNSDAPVIRSKTSARYMELVGWLVDRGITSEKQWIQEDQASYISFNAASNSRSQIKAALDNASKIMSLTKTAPDYLVGQNPPEDISSNRIYRILEMNGYDPQYAASVFLGWAQKKFGKRNTIWLFGPATTGKTNIAEAIAHAVPFYGCVNWTNENFPFNDCVDKMVIWWEEGKMTAKVVESAKAILGGSKVRVDQKCKSSAQIDPTPVIVTSNTNMCAVIDGNSTTFEHQQPLQDRMFKFELTKRLEHDFGKVTKQEVKDFFRWASDHVTEVTHEFYVRKGGARKRPAPNDADISEPKRACPSVAQPSTSDAEAPVDYADRYQNKCSRHVGMNLMLFPCRQCERMNQNVDICFTHGVMDCAECFPVSESQPVSVVRKRTYQKLCPIHHIMGRAPEVACSACELANVDLDDCDMEQ

SEQ ID NO: 54 - protein, 537 aa, Adeno-associated virus 4
  MOD_RES (537)..(537): Xaa = any amino acid
MPGFYEIVLKVPSDLDEHLPGISDSFVSWVAEKEWELPPDSDMDLNLIEQAPLTVAEKLQREFLVEWRRVSKAPEALFFVQFEKGDSYFHLHILVETVGVKSMVVGRYVSQIKEKLVTRIYRGVEPQLPNWFAVTKTRNGAGGGNKVVDDCYIPNYLLPKTQPELQWAWTNMDQYISACLNLAERKRLVAQHLTHVSQTQEQNKENQNPNSDAPVIRSKTSARYMELVGWLVDRGITSEKQWIQEDQASYISFNAASNSRSQIKAALDNASKIMSLTKTAPDYLVGQNPPEDISSNRIYRILEMNGYDPQYAASVFLGWAQKKFGKRNTIWLFGPATTGKTNIAEAIAHAVPFYGCVNWTNENFPFNDCVDKMVIWWEEGKMTAKVVESAKAILGGSKVRVDQKCKSSAQIDPTPVIVTSNTNMCAVIDGNSTTFEHQQPLQDRMFKFELTKRLEHDFGKVTKQEVKDFFRWASDHVTEVTHEFYVRKGGARKRPAPNDADISEPKRACPSVAQPSTSDAEAPVDYADRLARGQPLX

SEQ ID NO: 55 - protein, 623 aa, Adeno-associated virus 4; identical to SEQ ID NO: 53

SEQ ID NO: 56 - protein, 544 aa, Adeno-associated virus 4
MSDDSEMRAAAGGAAVEGGQGADGVGNASGDWHCDSTWSEGHVTTTSTRTWVLPTYNNHLYKRLGESLQSNTYNGFSTPWGYFDFNRFHCHFSPRDWQRLINNNWGMRPKAMRVKIFNIQVKEVTTSNGETTVANNLTSTVQIFADSSYELPYVMDAGQEGSLPPFPNDVFMVPQYGYCGLVTGNTSQQQTDRNAFYCLEYFPSQMLRTGNNFEITYSFEKVPFHSMYAHSQSLDRLMNPLIDQYLWGLQSTTTGTTLNAGTATTNFTKLRPTNFSNFKKNWLPGPSIKQQGFSKTANQNYKIPATGSDSLIKYETHSTLDGRWSALTPGPPMATAGPADSKFSNSQLIFAGPKQNGNTATVPGTLIFTSEEELAATNATDTDMWGNLPGGDQSNSNLPTVDRLTALGAVPGMVWQNRDIYYQGPIWAKIPHTDGHFHPSPLIGGFGLKHPPPQIFIKNTPVPANPATTFSSTPVNSFITQYSTGQVSVQIDWEIQKERSKRWNPEVQFTSNYGQQNSLLWAPDAAGKYTEPRAIGTRYLTHHL

SEQ ID NO: 57 - protein, 734 aa, Adeno-associated virus 4
MTDGYLPDWLEDNLSEGVREWWALQPGAPKPKANQQHQDNARGLVLPGYKYLGPGNGLDKGEPVNAADAAALEHDKAYDQQLKAGDNPYLKYNHADAEFQQRLQGDTSFGGNLGRAVFQAKKRVLEPLGLVEQAGETAPGKKRPLIESPQQPDSSTGIGKKGKQPAKKKLVFEDETGAGDGPPEGSTSGAMSDDSEMRAAAGGAAVEGGQGADGVGNASGDWHCDSTWSEGHVTTTSTRTWVLPTYNNHLYKRLGESLQSNTYNGFSTPWGYFDFNRFHCHFSPRDWQRLINNNWGMRPKAMRVKIFNIQVKEVTTSNGETTVANNLTSTVQIFADSSYELPYVMDAGQEGSLPPFPNDVFMVPQYGYCGLVTGNTSQQQTDRNAFYCLEYFPSQMLRTGNNFEITYSFEKVPFHSMYAHSQSLDRLMNPLIDQYLWGLQSTTTGTTLNAGTATTNFTKLRPTNFSNFKKNWLPGPSIKQQGFSKTANQNYKIPATGSDSLIKYETHSTLDGRWSALTPGPPMATAGPADSKFSNSQLIFAGPKQNGNTATVPGTLIFTSEEELAATNATDTDMWGNLPGGDQSNSNLPTVDRLTALGAVPGMVWQNRDIYYQGPIWAKIPHTDGHFHPSPLIGGFGLKHPPPQIFIKNTPVPANPATTFSSTPVNSFITQYSTGQVSVQIDWEIQKERSKRWNPEVQFTSNYGQQNSLLWAPDAAGKYTEPRAIGTRYLTHHL

SEQ ID NO: 58 - protein, 598 aa, Adeno-associated virus 4
TAPGKKRPLIESPQQPDSSTGIGKKGKQPAKKKLVFEDETGAGDGPPEGSTSGAMSDDSEMRAAAGGAAVEGGQGADGVGNASGDWHCDSTWSEGHVTTTSTRTWVLPTYNNHLYKRLGESLQSNTYNGFSTPWGYFDFNRFHCHFSPRDWQRLINNNWGMRPKAMRVKIFNIQVKEVTTSNGETTVANNLTSTVQIFADSSYELPYVMDAGQEGSLPPFPNDVFMVPQYGYCGLVTGNTSQQQTDRNAFYCLEYFPSQMLRTGNNFEITYSFEKVPFHSMYAHSQSLDRLMNPLIDQYLWGLQSTTTGTTLNAGTATTNFTKLRPTNFSNFKKNWLPGPSIKQQGFSKTANQNYKIPATGSDSLIKYETHSTLDGRWSALTPGPPMATAGPADSKFSNSQLIFAGPKQNGNTATVPGTLIFTSEEELAATNATDTDMWGNLPGGDQSNSNLPTVDRLTALGAVPGMVWQNRDIYYQGPIWAKIPHTDGHFHPSPLIGGFGLKHPPPQIFIKNTPVPANPATTFSSTPVNSFITQYSTGQVSVQIDWEIQKERSKRWNPEVQFTSNYGQQNSLLWAPDAAGKYTEPRAIGTRYLTHHL

SEQ ID NO: 59 - DNA, 129 bp, Adeno-associated virus 4
ttggccactccctctatgcgcgctcgctcactcactcggccctgcggccagaggccggcagtctggagacctttggtgtccagggcagggccgagtgagtgagcgagcgcgcatagagggagtggccaa

SEQ ID NO: 60 - DNA, 125 bp, Adeno-associated virus 4
ttggccactccctctatgcgcgctcgctcactcactcggccctggagaccaaaggtctccagactgccggcctctggccggcagggccgagtgagtgagcgagcgcgcatagagggagtggccaa

SEQ ID NO: 61 - DNA, 4768 bp, Adeno-associated virus 4
  modified_base (3009)..(3009): n = a, c, t, or g
  misc_feature (3009)..(3009): n is a, c, g, or t
ttggccactccctctatgcgcgctcgctcactcactcggccctggagaccaaaggtctccagactgccggcctctggccggcagggccgagtgagtgagcgagcgcgcatagagggagtggccaactccatcatctaggtttgcccactgacgtcaatgtgacgtcctagggttagggaggtccctgtattagcagtcacgtgagtgtcgtatttcgcggagcgtagcggagcgcataccaagctgccacgtcacagccacgtggtccgtttgcgacagtttgcgacaccatgtggtcaggagggtatataaccgcgagtgagccagcgaggagctccattttgcccgcgaattttgaacgagcagcagccatgccggggttctacgagatcgtgctgaaggtgcccagcgacctggacgagcacctgcccggcatttctgactcttttgtgagctgggtggccgagaaggaatgggagctgccgccggattctgacatggacttgaatctgattgagcaggcacccctgaccgtggccgaaaagctgcaacgcgagttcctggtcgagtggcgccgcgtgagtaaggccccggaggccctcttctttgtccagttcgagaagggggacagctacttccacctgcacatcctggtggagaccgtgggcgtcaaatccatggtggtgggccgctacgtgagccagattaaagagaagctggtgacccgcatctaccgcggggtcgagccgcagcttccgaactggttcgcggtgaccaagacgcgtaatggcgccggaggcgggaacaaggtggtggacgactgctacatccccaactacctgctccccaagacccagcccgagctccagtgggcgtggactaacatggaccagtatataagcgcctgtttgaatctcgcggagcgtaaacggctggtggcgcagcatctgacgcacgtgtcgcagacgcaggagcagaacaaggaaaaccagaaccccaattctgacgcgccggtcatcaggtcaaaaacctccgccaggtacatggagctggtcgggtggctggtggaccgcgggatcacgtcagaaaagcaatggatccaggaggaccaggcgtcctacatctccttcaacgccgcctccaactcgcggtcacaaatcaaggccgcgctggacaatgcctccaaaatcatgagcctgacaaagacggctccggactacctggtgggccagaacccgccggaggacatttccagcaaccgcatctaccgaatcctcgagatgaacgggtacgatccgcagtacgcggcctccgtcttcctgggctgggcgcaaaagaagttcgggaagaggaacaccatctggctctttgggccggccacgacgggtaaaaccaacatcgcggaagccatcgcccacgccgtgcccttctacggctgcgtgaactggaccaatgagaactttccgttcaacgattgcgtcgacaagatggtgatctggtgggaggagggcaagatgacggccaaggtcgtagagagcgccaaggccatcctgggcggaagcaaggtgcgcgtggaccaaaagtgcaagtcatcggcccagatcgacccaactcccgtgatcgtcacctccaacaccaacatgtgcgcggtcatcgacggaaactcgaccaccttcgagcaccaacaaccactccaggaccggatgttcaagttcgagctcaccaagcgcctggagcacgactttggcaaggtcaccaagcaggaagtcaaagactttttccggtgggcgtcagatcacgtgaccgaggtgactcacgagttttacgtcagaaagggtggagctagaaagaggcccgcccccaatgacgcagatataagtgagcccaagcgggcctgtccgtcagttgcgcagccatcgacgtcagacgcggaagctccggtggactacgcggacaggtaccaaaacaaatgttctcgtcacgtgggtatgaatctgatgctttttccctgccggcaatgcgagagaatgaatcagaatgtggacatttgcttcacgcacggggtcatggactgtgccgagtgcttccccgtgtcagaatctcaacccgtgtctgtcgtcagaaagcggacgtatcagaaactgtgtccgattcatcacatcatggggagggcgcccgaggtggcctgctcggcctgcgaactggccaatgtggacttggatgactgtgacatggaacaataaatgactcaaaccagatatgactgacggttaccttccagattggctagaggacaacctctctgaaggcgttcgagagtggtgggcgctgcaacctggagcccctaaacccaaggcaaatcaacaacatcaggacaacgctcggggtcttgtgcttccgggttacaaatacctcggacccggcaacggactcgacaagggggaacccgtcaacgcagcggacgcggcagccctcgagcacgacaaggcctacgaccagcagctcaaggccggtgacaacccctacctcaagtacaaccacgccgacgcggagttccagcagcggcttcagggcgacacaccgtttgggggcaacctcggcagagcagtcttccaggccaaaaagagggttcttgaacctcttggtctggttgagcaagcgggtgagacggctcctggaaagaagagaccgttgattgaatccccccagcagcccgactcctccacgggtatcggcaaaaaaggcaagcagccggctaaaaagaagctcgttttcgaagacgaaactggagcaggcgacggaccccctgagggatcaacttccggagccatgtctgatgacagtgagatgcgtgcagcagctggcggagctgcagtcgagggsggacaaggtgccgatggagtgggtaatgcctcgggtgattggcattgcgattccacctggtctgagggccacgtcacgaccaccagcaccagaacctgggtcttgcccacctacaacaaccacctntacaagcgactcggagagagcctgcagtccaacacctacaacggattctccaccccctggggatactttgacttcaaccgcttccactgccacttctcaccacgtgactggcagcgactcatcaacaacaactggggcatgcgacccaaagccatgcgggtcaaaatcttcaacatccaggtcaaggaggtcacgacgtcgaacggcgagacaacggtggctaataaccttaccagcacggttcagatctttgcggactcgtcgtacgaactgccgtacgtgatggatgcgggtcaagagggcagcctgcctccttttcccaacgacgtctttatggtgccccagtacggctactgtggactggtgaccggcaacacttcgcagcaacagactgacagaaatgccttctactgcctggagtactttccttcgcagatgctgcggactggcaacaactttgaaattacgtacagttttgagaaggtgcctttccactcgatgtacgcgcacagccagagcctggaccggctgatgaaccctctcatcgaccagtacctgtggggactgcaatcgaccaccaccggaaccaccctgaatgccgggactgccaccaccaactttaccaagctgcggcctaccaacttttccaactttaaaaagaactggctgcccgggccttcaatcaagcagcagggcttctcaaagactgccaatcaaaactacaagatccctgccaccgggtcagacagtctcatcaaatacgagacgcacagcactctggacggaagatggagtgccctgacccccggacctccaatggccacggctggacctgcggacagcaagttcagcaacagccagctcatctttgcggggcctaaacagaacggcaacacggccaccgtacccgggactctgatcttcacctctgaggaggagctggcagccaccaacgccaccgatacggacatgtggggcaacctacctggcggtgaccagagcaacagcaacctgccgaccgtggacagactgacagccttgggagccgtgcctggaatggtctggcaaaacagagacatttactaccagggtcccatttgggccaagattcctcataccgatggacactttcacccctcaccgctgattggtgggtttgggctgaaacacccgcctcctcaaatttttatcaagaacaccccggtacctgcgaatcctgcaacgaccttcagctctactccggtaaactccttcattactcagtacagcactggccaggtgtcggtgcagattgactgggagatccagaaggagcggtccaaacgctggaaccccgaggtccagtttacctccaactacggacagcaaaactctctgttgtgggctcccgatgcggctgggaaatacactgagcctagggctatcggtacccgctacctcacccaccacctgtaataacctgttaatcaataaaccggtttattcgtttcagttgaactttggtctccgtgtccttcttatcttatctcgtttccatggctactgcgtacataagcagcggcctgcggcgcttgcgcttcgcggtttacaactgccggttaatcagtaacttctggcaaaccatgatgatggagttggccactccctctatgcgcgctcgctcactcactcggccctggagaccaaaggtctccagactgccggcctctggccggcagggccgagtgagtgagcgagcgcgcatagagggagtggccaa

SEQ ID NO: 62 - DNA, 3098 bp, Adeno-associated virus
gaattcgccctttctacggctgcgtcaactggaccaatgagaactttcccttcaacgattgcgtcgacaagatggtgatctggtgggaggagggcaagatgacggccaaggtcgtggagtccgccaaggccattctcggcggcagcaaggtgcgcgtggaccaaaagtgcaagtcttccgcccagatcgatcccacccccgtgatcgtcacttccaacaccaacatgtgcgctgtgattgacgggaacagcaccaccttcgagcaccagcagccgttacaagaccggatgttcaaatttgaactcacccgccgtctggagcacgactttggcaaggtgacaaagcaggaagtcaaagagttcttccgctgggcgcaggatcacgtgaccgaggtggcgcatgagttctacgtcagaaagggtggagccaacaagagacccgcccccgatgacgcggataaaagcgagcccaagcgggcctgcccctcagtcgcggatccatcgacgtcagacgcggaaggagctccggtggactttgccgacaggtaccaaaacaaatgttctcgtcacgcgggcatgcttcagatgctgtttccctgcaagacatgcgagagaatgaatcagaatttcaacatttgcttcacgcacgggaccagagactgttcagaatgtttccccggcgtgtcagaatctcaaccggtcgtcagaaagaggacgtatcggaaactctgtgccattcatcatctgctggggcgggctcccgagattgcttgctcggcctgcgatctggtcaacgtggacctggatgaccgtgtttctgagcaataaatgacttaaaccaggtatggctgccgatggttatcttccagattggctcgaggacaacctctctgagggcattcgcgagtggtgggacttgaaacctggagccccgaaacccaaagccaaccagcaaaagcaggacgacggccggggtctggtgcttcctggctacaagtacctcggacccttcaacggactcgacaagggagagccggtcaacgaggcagacgccgcggccctcgagcacgacaaggcctacgacaagcagctcgagcagggggacaacccgtacctcaagtacaaccacgccgacgccgagtttcaggagcgtcttcaagaagatacgtcttttgggggcaacctcgggcgagcagtcttccaggccaagaagcgggttctcgaacctctcggtctggttgaggaaggcgctaagacggctcctggaaagaagagacccatagaatcccccgactcctccacgggcatcggcaagaaaggccagcagcccgctaaaaagaagctcaactttgggcagactggcgactcagagtcagtgcccgacccccaacctctcggagaacctcccgccgcgccctcaggtctgggatctggtacaatggctgcaggcggtggcgcaccaatggcagacaataacgaaggcgccgacggagtgggtaatgcctccggaaattggcattgcgattccacatggctgggcgacagagtcatcaccaccagcacccgcacctgggccctgcccacctacaacaaccacctctacaagcagatatcaagtcagagcggggctaccaacgacaaccacttcttcggctacagcaccccctggggctattttgacttcaacagattccactgccacttctcaccacgtgactggcagcgactcatcaacaacaactggggattccggcccagaaagctgcggttcaagttgttcaacatccaggtcaaggaggtcacgacgaacgacggcgttacgaccatcgctaataaccttaccagcacgattcaggtcttctcggactcggagtaccaactgccgtacgtcctcggctctgcgcaccagggctgcctccctccgttccctgcggacgtgttcatgattcctcagtacggatatctgactctaaacaacggcagtcagtctgtgggacgttcctccttctactgcctggagtactttccttctcagatgctgagaacgggcaataactttgaattcagctacacctttgaggaagtgcctttccacagcagctatgcgcacagccagagcctggaccggctgatgaatcccctcatcgaccagtacctgtactacctggcccggacccagagcactacggggtccacaagggagctgcagttccatcaggctgggcccaacaccatggccgagcaatcaaagaactggctgcccggaccctgttatcggcagcagagactgtcaaaaaacatagacagcaacaacaacagtaactttgcctggaccggggccactaaataccatctgaatggtagaaattcattaaccaacccgggcgtagccatggccaccaacaaggacgacgaggaccagttctttcccatcaacggagtgctggtttttggcgaaacgggggctgccaacaagacaacgctggaaaacgtgctaatgaccagcgaggaggagatcaaaaccaccaatcccgtggctacagaagaatacggtgtggtctccagcaacctgcaatcgtctacggccggaccccagacacagactgtcaacagccagggggctctgcccggcatggtctggcagaaccgggacgtgtacctgcagggtcccatctgggccaaaattcctcacacggacggcaactttcacccgtctcccctgatgggcggatttggactcaaacacccgcctcctcaaattctcatcaaaaacaccccggtacctgctaatcctccagaggtgtttactcctgccaagtttgcctcatttatcacgcagtacagcaccggccaggtcagcgtggagatcgagtgggaactgcagaaagaaaacagcaaacgctggaatccagagattcagtacacctcaaattatgccaagtctaataatgtggaatttgctgtcaacaacgaaggggtttatactgagcctcgccccattggcacccgttacctcacccgtaacctgtaattgcctgttaatcaataaaccggttaattcgtttcagttgaactttggtctctgcgaagggcgaattc

SEQ ID NO: 63 - protein, 728 aa, Adeno-associated virus
MAADGYLPDWLEDNLSEGIREWWDLKPGAPKPKANQQKQDDGRGLVLPGYKYLGPFNGLDKGEPVNEADAAALEHDKAYDKQLEQGDNPYLKYNHADAEFQERLQEDTSFGGNLGRAVFQAKKRVLEPLGLVEEGAKTAPGKKRPIESPDSSTGIGKKGQQPAKKKLNFGQTGDSESVPDPQPLGEPPAAPSGLGSGTMAAGGGAPMADNNEGADGVGNASGNWHCDSTWLGDRVITTSTRTWALPTYNNHLYKQISSQSGATNDNHFFGYSTPWGYFDFNRFHCHFSPRDWQRLINNNWGFRPRKLRFKLFNIQVKEVTTNDGVTTIANNLTSTIQVFSDSEYQLPYVLGSAHQGCLPPFPADVFMIPQYGYLTLNNGSQSVGRSSFYCLEYFPSQMLRTGNNFEFSYTFEEVPFHSSYAHSQSLDRLMNPLIDQYLYYLARTQSTTGSTRELQFHQAGPNTMAEQSKNWLPGPCYRQQRLSKNIDSNNNSNFAWTGATKYHLNGRNSLTNPGVAMATNKDDEDQFFPINGVLVFGETGAANKTTLENVLMTSEEEIKTTNPVATEEYGVVSSNLQSSTAGPQTQTVNSQGALPGMVWQNRDVYLQGPIWAKIPHTDGNFHPSPLMGGFGLKHPPPQILIKNTPVPANPPEVFTPAKFASFITQYSTGQVSVEIEWELQKENSKRWNPEIQYTSNYAKSNNVEFAVNNEGVYTEPRPIGTRYLTRNL

SEQ ID NO: 64 - DNA, 2495 bp, Adeno-associated virus
gaattcgccctttctacggctgcgtcaactagaccaatgagaactttcccttcaacgattgcgtcgacaagatggtgatctggtgggaggagggcaagatgacggccaaggtcgtggagtccgccaaggccattcatcatctgctggggcgggctcccgagattgcttgctcggcctgcgatctggtcaacgtggacctggatgactgtgtttctgagcaataaatgacttaaaccaggtatggctgccgatggttatcttccagattggctcgaggacaacctctctgagggcattcgcgagtggtgggacttgaaacctggagccccgaaacccaaagccaaccagcaaaagcaggacgacggccggggtctggtgcttcctggctacaagtacctcggacccttcaacggactcgacaagggagagccggtcaacgaggcagacgccgcggccctcgagcacgacaaggcctacgacaagcagctcgagcagggggacaacccgtacctcaagtacaaccacgccgacgccgagtttcaggagcgtcttcaagaagatacgtcttttgggggcaacctcgggcgagcagtcttccaggccaagaagcgggttctcgaacctctcggtctggttgaggaaggcgctaagacggctcctggaaagaagagacccatagaatcccccgactcctccacgggcatcggcaagaaaggccagcagcccgctaaaaagaagctcaactttgggcagactggcgactcagagtcagtgcccgaccctcaaccaatcggagaaccccccgcaggcccctctggtctgggatctggtacaatggctgcaggcggtggcgctccaatggcagacaataacgaaggcgccgacggagtgggtaatgcctccggaaattggcattgcgattccacatggctgggcgacagagtcatcaccaccagcacccgcacctgggccctgcccacctacaacaaccacctctacaagcagatatcaagtcagagcggggctaccaacgacaaccacttcttcggctacagcaccccctggggctattttgacttcaacagattccactgccacttctcaccacgtgactggcagcgactcatcaacaacaactggggattccggcccagaaagctgcggttcaagttgttcaacatccaggtcaaggaggtcacgacgaacgacggcgttacgaccatcgctaataaccttaccagcacgattcaggtcttctcggactcggagtaccaactgccgtacgtcctcggctctgcgcaccagggctgcctccctccgttccctgcggacgtgttcatgattcctcagtacggatatctgactctaaacaacggcagtcagtctgtgggacgttcctccttctactgcctggagtactttccttctcagatgctgagaacgggcaataactttgaattcagctacacctttgaggaagtgcctttccacagcagctatgcgcacagccagagcctggaccggctgatgaatcccctcatcgaccagtacctgtactacctggcccggacccagagcactacggggtccacaagggagctgcagttccatcaggctgggcccaacaccatggccgagcaatcaaagaactggctgcccggaccctgttatcggcagcagagactgtcaaaaaacatagacagcaacaacaccagtaactttgcctggaccggggccactaaataccatctgaatggtagaaattcattaaccaacccgggcgtagccatggccaccaacaaggacgacgaggaccagttctttcccatcaacggagtgctggtttttggcaaaacgggggctgccaacaagacaacgctggaaaacgtgctaatgaccagcgaggaggagatcaaaaccaccaatcccgtggctacagaacagtacggtgtggtctccagcaacctgcaatcgtctacggccggaccccagacacagactgtcaacagccagggggctctgcccggcatggtctggcagaaccgggacgtgtacctgcagggtcccatctgggccaaaattcctcacacggacggcaactttcacccgtctcccctgatgggcggatttggactcaaacacccgcctcctcaaattctcatcaaaaacaccccggtacctgctaatcctccagaggtgtttactcctgccaagtttgcctcatttatcacgcagtacagcaccggccaggtcagcgtggagatcgagtgggaactgcagaaagaaaacagcaaacgctggaatccagagattcagtacacctcaaattatgccaagtctaataatgtggaatttgctgtcaacaacgaaggggtttatactgagcctcgccccattggcacccgttacctcacccgtaacctgtaattgcctgttaatcaataaaccggttaattcgtttcagttgaactttggtctctgcgaagggcgaattc

SEQ ID NO: 65 - protein, 728 aa, Adeno-associated virus
MAADGYLPDWLEDNLSEGIREWWDLKPGAPKPKANQQKQDDGRGLVLPGYKYLGPFNGLDKGEPVNEADAAALEHDKAYDKQLEQGDNPYLKYNHADAEFQERLQEDTSFGGNLGRAVFQAKKRVLEPLGLVEEGAKTAPGKKRPIESPDSSTGIGKKGQQPAKKKLNFGQTGDSESVPDPQPIGEPPAGPSGLGSGTMAAGGGAPMADNNEGADGVGNASGNWHCDSTWLGDRVITTSTRTWALPTYNNHLYKQISSQSGATNDNHFFGYSTPWGYFDFNRFHCHFSPRDWQRLINNNWGFRPRKLRFKLFNIQVKEVTTNDGVTTIANNLTSTIQVFSDSEYQLPYVLGSAHQGCLPPFPADVFMIPQYGYLTLNNGSQSVGRSSFYCLEYFPSQMLRTGNNFEFSYTFEEVPFHSSYAHSQSLDRLMNPLIDQYLYYLARTQSTTGSTRELQFHQAGPNTMAEQSKNWLPGPCYRQQRLSKNIDSNNTSNFAWTGATKYHLNGRNSLTNPGVAMATNKDDEDQFFPINGVLVFGKTGAANKTTLENVLMTSEEEIKTTNPVATEQYGVVSSNLQSSTAGPQTQTVNSQGALPGMVWQNRDVYLQGPIWAKIPHTDGNFHPSPLMGGFGLKHPPPQILIKNTPVPANPPEVFTPAKFASFITQYSTGQVSVEIEWELQKENSKRWNPEIQYTSNYAKSNNVEFAVNNEGVYTEPRPIGTRYLTRNL

SEQ ID NO: 66 - DNA, 2504 bp, Adeno-associated virus
gaattcgccctttctacggctgcgtcaactggaccaatgagaactttcccttcaacgattgcgtcgacaagatggtgatctggtgggaggagggcaagatgacggccaaggtcgtggagtccgccaaggccattcatcatctgctggggcgggctcccgagattgcttgctcggcctgcgatctggtcaacgtggacctggatgactgtgtttctgagcaataaatgacttaaaccaggtatggctgccgatggttatcttccagattggctcgaggacaacctctctgagggcattcgcgagtggtgggacttgaaacctggagccccgaaacccaaagccaaccagcaaaagcaggacgacggccggggtctggtgcttcctggctacaagtacctcggacccttcaacggactcgacaagggagagccggtcaacgaggcagacgccgcggccctcgagcacgacaaggcctacgacaagcagctcgagcagggggacaacccgtacctcaagtacaaccacgccgacgccgagtttcaggagcgtcttcaagaagatacgtcttttgggggcaacctcgggcgagcagtcttccaggccaagaagcgggttctcgaacctctcggtctggttgaggaaggcgctaagacggctcctggaaagaagagacccatagaatcccccgactcctccacgggcatcggcaagaaaggccagcagcccgctaaaaagaagctcaactttgggcagactggcgactcagagtcagtgcccgaccctcaaccaatcggagaaccccccgcaggcccctctggtctgggatctggtacaatggctgcaggcggtggcgctccaatggcagacaataacgaaggcgccgacggagtgggtaatgcctccggaaattggcattgcgattccacatggctgggcgacagagtcatcaccaccagcacccgcacctgggccctgcccacctacaacaaccacctctacaagcagatatcaagtcagagcggggctaccaacgacaaccacttcttcggctacagcaccccctggggctattttgacttcaacagattccactgccacttctcatcacgtgactggcagcgactcatcaacaacaactggggattccggcccaagagactcaacttcaagctcttcaacatccaggtcaaggaggtcacgcagaatgaaggcaccaagaccatcgccaataaccttaccagcacgattcaggtctttacggactcggaataccggctcccgtacgtcctcggctctgcgcaccagggctgcctgcctccgttcccggcggacgtcttcatgattcctcagtacgggtacctgactctgaacaacggcagtcaggccgtgggccgttcctccttctactgcctggagtactttccttctcaaatgctgagaacgggcaacaactttgagttcagctaccagtttgaggacgtgccttttcacagcagctacgcgcacagccaaagcctggaccggctgatgaaccccctcatcgaccagtacctgtactacctgtctcggactcagtccacgggaggtaccgcaggaactcagcagttgctattttctcaggccgggcctaataacatgtcggctcaggccaaaaactggctacccgggccctgctaccggcagcaacgcgtctccacgacactgtcgcaaaataacaacagcaactttgcttggaccggtgccaccaagtatcatctgaatggcagagactctctggtaaatcccggtgtcgctatggcaacgcacaaggacgacgaagagcgattttttccatccagcggagtcttgatgtttgggaaacagggagctggaaaagacaacgtggactatagcagcgttatgctaaccagtgaggaagaaatcaaaaccaccaacccagtggccacagaacagtacggcgtggtggccgataacctgcaacagcaaaacgccgctcctattgtaggggccgtcaacagtcaaggagccttacctggcatggtctggcagaaccgggacgtgtacctgcagggtcctatctgggccaagattcctcacacggacggcaactttcatccttcgccgctgatgggaggctttggactgaaacacccgcctcctcagatcctgattaagaatacacctgttcccgcggatcctccaactaccttcagtcaagccaagccggcgtcgttcatcacgcagtacagcaccggacaggtcagcgtggaaattgaatgggagctgcagaaagagaacagcaagcgctggaacccagagattcagtatacttccaactactacaaatctacaaatgtggactttgctgtcaatactgagggtacttattcagagcctcgccccattggcacccgttacctcacccgtaacctgtaattgcctgttaatcaataaaccggttaattcgtttcagttgaactttggtctctgcgaagggcgaattc

SEQ ID NO: 67 - protein, 731 aa, Adeno-associated virus
MAADGYLPDWLEDNLSEGIREWWDLKPGAPKPKANQQKQDDGRGLVLPGYKYLGPFNGLDKGEPVNEADAAALEHDKAYDKQLEQGDNPYLKYNHADAEFQERLQEDTSFGGNLGRAVFQAKKRVLEPLGLVEEGAKTAPGKKRPIESPDSSTGIGKKGQQPAKKKLNFGQTGDSESVPDPQPIGEPPAGPSGLGSGTMAAGGGAPMADNNEGADGVGNASGNWHCDSTWLGDRVITTSTRTWALPTYNNHLYKQISSQSGATNDNHFFGYSTPWGYFDFNRFHCHFSSRDWQRLINNNWGFRPKRLNFKLFNIQVKEVTQNEGTKTIANNLTSTIQVFTDSEYRLPYVLGSAHQGCLPPFPADVFMIPQYGYLTLNNGSQAVGRSSFYCLEYFPSQMLRTGNNFEFSYQFEDVPFHSSYAHSQSLDRLMNPLIDQYLYYLSRTQSTGGTAGTQQLLFSQAGPNNMSAQAKNWLPGPCYRQQRVSTTLSQNNNSNFAWTGATKYHLNGRDSLVNPGVAMATHKDDEERFFPSSGVLMFGKQGAGKDNVDYSSVMLTSEEEIKTTNPVATEQYGVVADNLQQQNAAPIVGAVNSQGALPGMVWQNRDVYLQGPIWAKIPHTDGNFHPSPLMGGFGLKHPPPQILIKNTPVPADPPTTFSQAKPASFITQYSTGQVSVEIEWELQKENSKRWNPEIQYTSNYYKSTNVDFAVNTEGTYSEPRPIGTRYLTRNL

SEQ ID NO: 68 - DNA, 3128 bp, Adeno-associated virus
gaattcgccctttctacggctgcgtcaactggaccaatgagaactttcccttcaacgattgcgtcgacaagatggtgatctggtgggaggagggcaagatgacggccaaggtcgtggagtccgccaaggccattctcggcggcagcaaggtgcgcgtggaccaaaagtgcaagtcttccgcccagatcgatcccacccccgtgatcgtcacttccaacaccaacatgtgcgccgtgattgacgggaacagcaccaccttcgagcaccagcagccgttacaagaccggatgttcaaatttgaactcacccgccgtctggagcacgactttggcaaggtgacaaagcaggaagtcaaagagttcttccgctgggcgcaggatcacgtgaccgaggtggcgcatgagttctacgtcagaaagggtggagccaacaagagacccgcccccgatgacgcggataaaagcgagcccaagcgggcctgcccctcagtcgcggatccatcgacgtcagacgcggaaggagctccggtggactttgccgacaggtaccaaaacaaatgttctcgtcacgcgggcatgcttcagatgctgtttccctgcaagacatgcgagagaatgaatcagaatttcaacatttgcttcacgcacgggaccagagactgttcagaatgtttccccggcgtgtcagaatctcaaccggtcgtcagaaagaggacgtatcggaaactctgtgccattcatcatctgctagggcgggctcccgagattgcttgctcggcctgcgatctggtcaacgtggacctggatgactgtgtttctgagcaataaatgacttaaaccaggtatggctgccgatggttatcttccagattggctcgaggacaacctctctgagggcattcgcgagtggtgggacttgaaacctggagccccgaaacccaaagccaaccagcaaaagcaggacgacggccggggtctggtgcttcctggctacaagtacctcggacccttcaacggactcgacaagggggagcccgtcaacgcggcggacgcagcggccctcgagcacgacaaggcctacgaccagcagctcaaagcgggtgacaatccgtacctgcggtataaccacgccgacgccgagtttcaggagcgtctgcaagaagatacgtcttttgggggcaacctcgggcgagcagtcttccaggccaagaagcgggttctcgaacctctcggtctggttgaggaaggcgctaagacggctcctggaaagaagagaccggtagagccatcaccccagcgttctccagactcctctacgggcatcggcaagacaggccagcagcccgcgaaaaagagactcaactttgggcagactggcgactcagagtcagtgcccgaccctcaaccaatcggagaaccccccgcaggcccctctggtctgggatctggtacaatggctgcaggcggtggcgctccaatggcagacaataacgaaggcgccgacggagtgggtagttcctcaggaaattggcattgcgattccacatggctgggcgacagagtcatcaccaccagcacccgaacctgggccctccccacctacaacaaccacctctacaagcaaatctccaacgggacatcgggaggaagcaccaacgacaacacctacttcggctacagcaccccctgggggtattttgactttaacagattccactgccacttctcaccacgtgactggcagcgactcatcaacaacaactggggattccggcccaagagactcaacttcaagctcttcaacatccaggtcaaggaggtcacgcagaatgaaggcaccaagaccatcgccaataaccttaccagcacgattcaggtctttacggactcggaataccagctcccgtacgtcctcggctctgcgcaccagggctgcctgcctccgttcccggcggacgtcttcatgattcctcagtacgggtacctgactctgaacaacggcagtcaggccgtgggccgttcctccttctactgcctggagtactttccttctcaaatgctgagaacgggcaacaactttgagttcagctaccagtttgaggacgtgccttttcacagcagctacgcgcacagccaaagcctggaccggctgatgaaccccctcatcgaccagtacctgtactacctgtctcggactcagtccacgggaggtaccgcaggaactcagcagttgctattttctcaggccgggcctaataacatgtcggctcaggccaaaaactggctacccgggccctgctaccggcagcaacgcgtctccacgacactgtcgcaaaataacaacagcaactttgcttggaccggtgccaccaagtatcatctgaatggcagagactctctggtaaatcccggtgtcgctatggcaacgcacaaggacgacgaagagcgattttttccatccagcggagtcttgatgtttgggaaacagggagctggaaaagacaacgtggactatagcagcgttatgctaaccagtgaggaagaaatcaaaaccaccaacccagtggccacagaacagtacggcgtggtggccgataacctgcaacagcaaaacgccgctcctattgtaggggccgtcaacagtcaaggagccttacctggcatggtctggcagaaccgggacgtgtacctgcagggtcctatctgggccaagattcctcacacggacggcaactttcatccttcgccgctgatgggaggctttggactgaaacacccgcctcctcagatcctgattaagaatacacctgttcccgcggatcctccaactaccttcagtcaagccaagctggcgtcgttcatcacgcagtacagcaccggacaggtcagcgtggaaattgaatgggagctgcagaaagagaacagcaagcgctggaacccagagattcagtatacttccaactactacaaatctacaaatgtggactttgctgtcaatactgagggtacttattcagagcctcgccccattggcacccgttacctcacccgtaacctgtaattgcctgttaatcaataaaccggctaattcgtttcagttgaactttggtctctgcgaagggcgaattc

SEQ ID NO: 69 - protein, 738 aa, Adeno-associated virus
MAADGYLPDWLEDNLSEGIREWWDLKPGAPKPKANQQKQDDGRGLVLPGYKYLGPFNGLDKGEPVNAADAAALEHDKAYDQQLKAGDNPYLRYNHADAEFQERLQEDTSFGGNLGRAVFQAKKRVLEPLGLVEEGAKTAPGKKRPVEPSPQRSPDSSTGIGKTGQQPAKKRLNFGQTGDSESVPDPQPIGEPPAGPSGLGSGTMAAGGGAPMADNNEGADGVGSSSGNWHCDSTWLGDRVITTSTRTWALPTYNNHLYKQISNGTSGGSTNDNTYFGYSTPWGYFDFNRFHCHFSPRDWQRLINNNWGFRPKRLNFKLFNIQVKEVTQNEGTKTIANNLTSTIQVFTDSEYQLPYVLGSAHQGCLPPFPADVFMIPQYGYLTLNNGSQAVGRSSFYCLEYFPSQMLRTGNNFEFSYQFEDVPFHSSYAHSQSLDRLMNPLIDQYLYYLSRTQSTGGTAGTQQLLFSQAGPNNMSAQAKNWLPGPCYRQQRVSTTLSQNNNSNFAWTGATKYHLNGRDSLVNPGVAMATHKDDEERFFPSSGVLMFGKQGAGKDNVDYSSVMLTSEEEIKTTNPVATEQYGVVADNLQQQNAAPIVGAVNSQGALPGMVWQNRDVYLQGPIWAKIPHTDGNFHPSPLMGGFGLKHPPPQILIKNTPVPADPPTTFSQAKLASFITQYSTGQVSVEIEWELQKENSKRWNPEIQYTSNYYKSTNVDFAVNTEGTYSEPRPIGTRYLTRNL

SEQ ID NO: 70 - DNA, 3084 bp, Adeno-associated virus
gaattcgccctttctacggctgcatcaactggaccaatgagaactttcccttcaacgattgcgtcgacaagatggtgatctggtgggaggagggcaagatgacggccaaggtcgtggagtccgccaaggccattctcggcggcagcaaggtgcgcgtggaccaaaagtgcaagtcgtccgcccagatcgaccccacccccgtgatcgtcacctccaacaccaacatgtgcgccgtgattgacgggaacagcaccaccttcgagcaccagcagccgttgcaggaccggatgttcaagttcgaactcacccgccgtctggagcacgactttggcaaggtgaccaagcaggaagtcaaagagttcttccgctgggcgcaggatcacgtgaccgaggtggcgcatgagttctacgtcagaaagggcggagccagcaaaagacccgcccccgatgacgcggatataagcgagcccaagcgggcctgcccctcagtcgcggatccatcgacgtcagacgcggaaggagctccggtggactttgccgacaggtaccaaaacaaatgttctcgtcacgcgggcatgcttcagatgctgtttccctgcaaaacgtgcgagaaaatgaatcagaatttcaacatttgcttcacgcacggggtcagagactgctcagaatgtttccccggtgcatcagaatctcaaccggtcgtcagaaaaaaaacgtatcagaaactgtgtgccattcatcatctgctggggcgggcacccgagattgcttgctcggcctgcgatctggtcaacgtggacctggacgactgtgtttctgagcaataaatgacttaaaccaggtatggctgccgatggttatcttccagattggcttgaggacaacctctctgagggcattcgcgagtggtgggacctgaaacctggagccccgaaacccaaagccaaccagcaaaagcaggacgacggccggggtctggtgcttcctggctacaagtacctcggacccttcaacggactcgacaagggggagcccgtcaacgcggcggacgcagcggccctcgagcacgacaaggcctacgaccagcagctcaaagcgggtgacaatccgtacctgcggtataaccacgccgacgccgagtttcaggagcgtctgcaagaagatacgtcttttgggggcaacctcgggcgagcagtcttccaggccaagaagcgggttctcgaacctctcggtctggttgaggaaggcgctaagacggctcctggaaagaagagaccggtagagccatcacctcagcgttcccccgactcctccacgggcatcggcaagaaaggccaccagcccgcgagaaagagactgaactttgggcagactggcgactcggagtcagtccccgaccctcaaccaatcggagaaccaccagcaggcccctctggtctgggatctggtacaatggctgcaggcggtggcgctccaatggcagacaataacgaaggcgccgacggagtgggtagttcctcaggaaattggcattgcgattccacatggctgggcgacagagtcatcaccaccagcacccgaacctgggccctgcccacctacaacaaccatctctacaagcaaatctccaacgggacatcgggaggaagcactaacgacaacacctactttggctacagcaccccctgggggtattttgacttcaacagattccactgccacttctcaccacgtgactggcagcgactcatcaacaataactggggattccggcccaagagactcaacttcaagctcttcaacatccaggtcaaggaggtcacgcagaatgaaggcaccaagaccatcgccaataaccttaccagcacgattcaggtgtttacggactcggaataccagctcccgtacgtccccggctctgcgcaccagggctgcctccctccgttcccggcggacgtcttcatgattcctcagtacgggtatctgaccctaaacaatggcagtcaggctgtgggccgttcctccttctactgcctggaatacttcccttctcaaatgctgaggacgggcaacaactttgaattcagctacaccttcgaggacgtgcctttccacagcagctacgcgcacagccagagcctggaccggctgatgaaccctctcatcgaccagtacctgtattacttatccagaactcagtccacaggaggaactcaaggtactcagcaattgttattttctcaagccgggcccgcaaacatgtcggctcaggccaagaactggctacctggaccgtgttaccgtcagcaacgagtttccacgacactgtcgcaaaacaacaacagcaattttgcttggaccggtgccaccaagtatcacctgaatggcagagactccctggttaatcccggcgttgccatggctacccacaaggacgacgaggagcgcttcttcccgtcaagcggagttctaatgtttggcaagcagggggctggaaaagacaatgtggactacagcagcgtgatgctcaccagcgaagaagaaattaaaactactaacccagtggctacagagcagtatggtgtggtggcagacaacctgcagcagaccaacggagctcccattgtgggaactgtcaacagccagggggccttacctggtatggtctggcaaaaccgggacgtgtacctgcagggccccatctgggccaaaattcctcacacggacggcaactttcatccttcgccgctgatgggaggctttggactgaaacacccgcctcctcagatcctggtgaaaaacactcctgttcctgcggatcctccgaccaccttcagccaggccaagctggcttcttttatcacgcagtacagcaccggacaggtcagcgtggaaatcgaatgggagctgcagaaagaaaacagcaagcgctggaacccagagattcagtatacttccaactactacaaatctacaaatgtggactttgctgtcaatactgagggtacttattcagagcctcgccccattggcactcgttatctcacccgtaatctgtaattgcttgttaatcaataaaccggt

SEQ ID NO: 71 - protein, 738 aa, Adeno-associated virus
MAADGYLPDWLEDNLSEGIREWWDLKPGAPKPKANQQKQDDGRGLVLPGYKYLGPFNGLDKGEPVNAADAAALEHDKAYDQQLKAGDNPYLRYNHADAEFQERLQEDTSFGGNLGRAVFQAKKRVLEPLGLVEEGAKTAPGKKRPVEPSPQRSPDSSTGIGKKGHQPARKRLNFGQTGDSESVPDPQPIGEPPAGPSGLGSGTMAAGGGAPMADNNEGADGVGSSSGNWHCDSTWLGDRVITTSTRTWALPTYNNHLYKQISNGTSGGSTNDNTYFGYSTPWGYFDFNRFHCHFSPRDWQRLINNNWGFRPKRLNFKLFNIQVKEVTQNEGTKTIANNLTSTIQVFTDSEYQLPYVPGSAHQGCLPPFPADVFMIPQYGYLTLNNGSQAVGRSSFYCLEYFPSQMLRTGNNFEFSYTFEDVPFHSSYAHSQSLDRLMNPLIDQYLYYLSRTQSTGGTQGTQQLLFSQAGPANMSAQAKNWLPGPCYRQQRVSTTLSQNNNSNFAWTGATKYHLNGRDSLVNPGVAMATHKDDEERFFPSSGVLMFGKQGAGKDNVDYSSVMLTSEEEIKTTNPVATEQYGVVADNLQQTNGAPIVGTVNSQGALPGMVWQNRDVYLQGPIWAKIPHTDGNFHPSPLMGGFGLKHPPPQILVKNTPVPADPPTTFSQAKLASFITQYSTGQVSVEIEWELQKENSKRWNPEIQYTSNYYKSTNVDFAVNTEGTYSEPRPIGTRYLTRNL

SEQ ID NO: 72 - DNA, 3123 bp, Adeno-associated virus
gaattcgcccttggctgcgtcaactggaccaatgagaactttcccttcaacgattgcgtcgacaagatggtgatctggtgggaggagggcaagatgacggccaaggtcgtggagtccgccaaggccattctcggcggcagcaaggtgcgcgtggaccaaaagtgcaagtcgtccgcccagatcgaccccacccccgtgatcgtcacctccaacaccaacatgtgcgccgtgattgacgggaacagcaccaccttcgagcaccagcagccgttgcaggaccggatgttcaagttcgaactcacccgccgtctggagcacgactttggcaaggtgaccaagcaggaagtcaaagagttcttccgctgggcgcaggatcacgtgaccgaggtggcgcatgagttctacgtcagaaagggcggagccagcaaaagacccgcccccgatgacgcggatataagcgagcccaagcgggcctgcccctcagtcgcggatccatcgacgtcagacgcggaaggagctccggtggactttgccgacaggtaccaaaacaaatgttctcgtcacgcgggcatgctccagatgctgtttccctgcaaaacgtgcgagagaatgaatcagaatttcaacatttgcttcacgcacggggtcagagactgctcagaatgtttccccggtgcatcagaatctcaaccggtcgtcagaaaaaaaacgtatcagaaactgtgtgccattcatcatctgctggggcgggcacccgagattgcttgctcggcctgcgatctggtcaacgtggacctggacgactgtgtttctgagcaataaatgacttaaaccaggtatggctgccgatggttatcttccagattggcttgaggacaacctctctgagggcattcgcgagtggtgggacctgaaacctggagccccgaaacccaaagccaaccagcaaaagcaggacgacggccggggtctggtgcttcctggctacaagtacctcggacccttcaacggactcgacaagggggagcccgtcaacgcggcggacgcagcggccctcgagcacgacaaggcctacgaccagcagctcaaagcgggtgacaatccgtacctgcggtataaccacgccgacgccgagtttcaggagcgtctgcaagaagatacgtcttttgggggcaacctcgggcgagcagtcttccaggccaagaagcgggttctcgaacctctcggtctggttgaggaaggcgctaagacggctcctggaaagaagagaccggtagagccatcacctcagcgttcccccgactcctccacgggcatcggcaagaaaggccaccagcccgcgagaaagagactgaactttgggcagactggcgactcggagtcagtccccgaccctcaaccaatcggagaaccaccagcaggcccctctggtctgggatctggtacaatggctgcaggcggtggcgctccaatggcagacaataacgaaggcgccgacggagtgggtagttcctcaggaaattggcattgcgattccacatggctgggcgacagagtcatcaccaccagcacccgaacctgggccctgcccacctacaacaaccatctctacaagcaaatctccaacgggacatcgggaggaagcactaacgacaacacctactttggctacagcaccccctgggggtattttgacttcaacagattccactgccacttctcaccacgtgactggcagcgactcatcaacaataactggggattccggcccaagagactcaacttcaagctcttcaacatccaggtcaaggaggtcacgcagaatgaaggcaccaagaccatcgccaataaccttaccagcacgattcaggtgtttacggactcggaataccagctcccgtacgtcctcggctctgcgcaccagggctgcctccctccgttcccggcggacgtcttcatgattcctcagtacgggtatctgaccctaaacaatggcagtcaggctgtgggccgttcctccttctactgcctggaatacttcccttctcaaatgctgaggacgggcaacaactttgaattcagctacaccttcgaggacgtgcctttccacagcagctacgcgcacagccagagcctggaccggctgatgaaccctctcatcgaccagtacctgtattacttatccagaactcagtccacaggaggaactcaaggtactcagcaattgttattttctcaagccgggcccgcaaacatgtcggctcaggccaagaactggctacctggaccgtgttaccgtcagcaacgagtttccacgacactgtcgcaaaacaacaacagcaattttgcttggaccggtgccaccaagtatcacctgaatggcagagactccctggttaatcccggcgttgccatggctacccacaaggacgacgaggagcgcttcttcccgtcaagcggagttctaatgtttggcaagcagggggctggaaaagacaatgtggactacagcagcgtgatgctcaccagcgaagaagaaattaaaactactaacccagtggctacagagcagtatggtgtggtggcagacaacctgcagcagaccaacggagctcccattgtgggaactgtcaacagccagggggccttacctggtatggtctggcaaaaccgggacgtgtacctgcagggccccatctgggccaaaattcctcacacggacggcaactttcatccttcgccgctgatgggaggctttggactgaaacacccgcctcctcagatcctggtgaaaaacactcctgttcctgcggatcctccgaccaccttcagccaggccaagctggcttcttttatcacgcagtacagcaccggacaggtcagcgtggaaatcgaatgggagctgcagaaagaaaacagcaagcgctggaacccagagattcagtatacttccaactactacaaatctacaaatgtggactttgctgtcaatactgagggtacttattcagagcctcgccccattggcactcgttatctcacccgtaatctgtaattgcttgttaatcaataaaccggttaattcgtttcagttgaactttggtctctgcgaagggcgaattc

SEQ ID NO: 73 - protein, 738 aa, Adeno-associated virus
MAADGYLPDWLEDNLSEGIREWWDLKPGAPKPKANQQKQDDGRGLVLPGYKYLGPFNGLDKGEPVNAADAAALEHDKAYDQQLKAGDNPYLRYNHADAEFQERLQEDTSFGGNLGRAVFQAKKRVLEPLGLVEEGAKTAPGKKRPVEPSPQRSPDSSTGIGKKGHQPARKRLNFGQTGDSESVPDPQPIGEPPAGPSGLGSGTMAAGGGAPMADNNEGADGVGSSSGNWHCDSTWLGDRVITTSTRTWALPTYNNHLYKQISNGTSGGSTNDNTYFGYSTPWGYFDFNRFHCHFSPRDWQRLINNNWGFRPKRLNFKLFNIQVKEVTQNEGTKTIANNLTSTIQVFTDSEYQLPYVLGSAHQGCLPPFPADVFMIPQYGYLTLNNGSQAVGRSSFYCLEYFPSQMLRTGNNFEFSYTFEDVPFHSSYAHSQSLDRLMNPLIDQYLYYLSRTQSTGGTQGTQQLLFSQAGPANMSAQAKNWLPGPCYRQQRVSTTLSQNNNSNFAWTGATKYHLNGRDSLVNPGVAMATHKDDEERFFPSSGVLMFGKQGAGKDNVDYSSVMLTSEEEIKTTNPVATEQYGVVADNLQQTNGAPIVGTVNSQGALPGMVWQNRDVYLQGPIWAKIPHTDGNFHPSPLMGGFGLKHPPPQILVKNTPVPADPPTTFSQAKLASFITQYSTGQVSVEIEWELQKENSKRWNPEIQYTSNYYKSTNVDFAVNTEGTYSEPRPIGTRYLTRNL

SEQ ID NO: 74 - DNA, 3122 bp, Adeno-associated virus
gaattcgccctttctacggctgcgtcaactggaccaatgagaactttcccttcaacgattgcgtcgacaagatggtgatctggtgggaggagggcaagatgacggccaaggtcgtggagtccgccaaggccattctcggcggcagcaaggtgcgtgtggaccaaaagtgcaagtcttccgcccagatcgatcccacccccgtgatcgtcacctccaacaccaacatgtgcgccgtgattgacgggaacagcgccaccttcgagcaccagcagccgttgcaggaccggatgttcaaatttgaactcacccgccgtctggagcatgactttggcaaggtgacgaagcaggaagtcaaagagttcttccgctgggcgcaggatcacgtgaccgaggtggcgcatgagttccacgtcagaaagggtggagccaacaagagacccgcccccgatgacgcggatataagcgagcccaagcgggcctgcccctcagtcgcggatccatcgacgtcagacgcggaaggagctccggtggactttgccgacaggtaccaaaacaaatgttctcgtcacgcgggcatgcttcagatgctgtttccctgcaagacatgcgagagaatgaatcagaatttcaacatttgcttcacgcacgggaccagagactgttcagaatgtttccccggcgtgtcagaatctcaaccggtcgtcagaaagaggacgtatcggaaactctgtgcgattcatcatctgctggggcgggctcccgagattgcttgctcggcctgcgatctggtcaacgtggacctggatgactgtgtttctgagcaataaatgacttaaaccaggtatggctgccgatggttatcttccagattggctcgaggacaacctctctgagggcattcgcgagtggtgggacttgaaacctggagccccgaaacccaaagccaaccagcaaaagcaggacgacggccggggtctggtgcttcctggctacaagtacctcggacccttcaacggactcgacaagggggagcccgtcaacgcggcggacgcagcggccctcgagcacgacaaagcctacgaccagcagctcaaagcgggtgacaatccgtacctgcggtataatcacgccgacgccgagtttcaggagcgtctgcaagaagatacgtcttttgggggcaacctcgggcgagcagtcttccaggccaagaagcgggttctcgaacctctcggtctggttgaggaaggcgctaagacggctcctggaaagaagagactggtagagcagtcgccacaagagccagactcctcctcgggcatcggcaagacaggccagcagcccgctaaaaagagactcaattttggtcagactggcgactcagagtcagtccccgacccacaacctctcggagaacctccagcagccccctcaggtctgggacctaatacaatggcttcaggcggtggcgctccaatggcagacaataacgaaggcgccgacggagtgggtaattcctcgggaaattggcattgcgattccacatggctgggggacagagtcatcaccaccagcacccgaacctgggccctgcccacctacaacaaccacctctacaagcaaatctccaacggcacctcgggaggaagcaccaacgacaacacctattttggctacagcaccccctgggggtattttgacttcaacagattccactgtcacttttcaccacgtgactggcaacgactcatcaacaacaattggggattccggcccaaaagactcaacttcaagctgttcaacatccaggtcaaggaagtcacgacgaacgaaggcaccaagaccatcgccaataatctcaccagcaccgtgcaggtctttacggactcggagtaccagttaccgtacgtgctaggatccgctcaccagggatgtctgcctccgttcccggcggacgtcttcacggttcctcagtacggctatttaactttaaacaatggaagccaagccctgggacgttcctccttctactgtctggagtatttcccatcgcagatgctgagaaccggcaacaactttcagttcagctacaccttcgaggacgtgcctttccacagcagctacgcgcacagccagagcctggacaggctgatgaatcccctcatcgaccagtacctgtactacctggtcagaacgcaaacgactggaactggagggacgcagactctggcattcagccaagcgggtcctagctcaatggccaaccaggctagaaattgggtgcccggaccttgctaccggcagcagcgcgtctccacgacaaccaaccagaacaacaacagcaactttgcctggacgggagctgccaagtttaagctgaacggccgagactctctaatgaatccgggcgtggcaatggcttcccacaaggatgacgacgaccgcttcttcccttcgagcggggtcctgatttttggcaagcaaggagccgggaacgatggagtggattacagccaagtgctgattacagatgaggaagaaatcaaggctaccaaccccgtggccacagaagaatatggagcagtggccatcaacaaccaggccgccaatacgcaggcgcagaccggactcgtgcacaaccagggggtgattcccggcatggtgtggcagaatagagacgtgtacctgcagggtcccatctgggccaaaattcctcacacggacggcaactttcacccgtctcccctgatgggcggctttggactgaagcacccgcctcctcaaattctcatcaagaacacaccggttccagcggacccgccgcttaccttcaaccaggccaagctgaactctttcatcacgcagtacagcaccggacaggtcagcgtggaaatcgagtgggagctgcagaaagaaaacagcaaacgctggaatccagagattcaatacacttccaactactacaaatctacaaatgtggactttgctgtcaacacggaaggagtttatagcgagcctcgccccattggcacccgttacctcacccgcaacctgtaattacatgttaatcaataaaccggttaattcgtttcagttgaactttggtctctgcgaagggcgaattc

SEQ ID NO: 75 - protein, 736 aa, Adeno-associated virus
MAADGYLPDWLEDNLSEGIREWWDLKPGAPKPKANQQKQDDGRGLVLPGYKYLGPFNGLDKGEPVNAADAAALEHDKAYDQQLKAGDNPYLRYNHADAEFQERLQEDTSFGGNLGRAVFQAKKRVLEPLGLVEEGAKTAPGKKRLVEQSPQEPDSSSGIGKTGQQPAKKRLNFGQTGDSESVPDPQPLGEPPAAPSGLGPNTMASGGGAPMADNNEGADGVGNSSGNWHCDSTWLGDRVITTSTRTWALPTYNNHLYKQISNGTSGGSTNDNTYFGYSTPWGYFDFNRFHCHFSPRDWQRLINNNWGFRPKRLNFKLFNIQVKEVTTNEGTKTIANNLTSTVQVFTDSEYQLPYVLGSAHQGCLPPFPADVFTVPQYGYLTLNNGSQALGRSSFYCLEYFPSQMLRTGNNFQFSYTFEDVPFHSSYAHSQSLDRLMNPLIDQYLYYLVRTQTTGTGGTQTLAFSQAGPSSMANQARNWVPGPCYRQQRVSTTTNQNNNSNFAWTGAAKFKLNGRDSLMNPGVAMASHKDDDDRFFPSSGVLIFGKQGAGNDGVDYSQVLITDEEEIKATNPVATEEYGAVAINNQAANTQAQTGLVHNQGVIPGMVWQNRDVYLQGPIWAKIPHTDGNFHPSPLMGGFGLKHPPPQILIKNTPVPADPPLTFNQAKLNSFITQYSTGQVSVEIEWELQKENSKRWNPEIQYTSNYYKSTNVDFAVNTEGVYSEPRPIGTRYLTRNL

SEQ ID NO: 76 - DNA, 3117 bp, Adeno-associated virus
gaattcgcccttggctgcgtcaactggaccaatgagaactttcccttcaacgattgcgtcgacaagatggtgatctggtgggaggagggcaagatgacggccaaggtcgtggagtccgccaaggccattctcggcggcagcaaggtgcgtgtggaccaaaagtgcaagtcttccgcccagatcgatcccacccccgtgatcgtcacctccaacaccaacatgtgcgccgtgattgacgggaacagcaccaccttcgagcaccagcagccgttgcaggaccggatgttcaaatttgaactcacccgccgtctggagcatgactttggcaaggtgacgaagcaggaagtcaaagagttcttccgctgggcgcaggatcacgtgaccgaggtggcgcatgagttccacgtcagaaagggtggagccaacaagagacccgcccccgatgacgcggatataagcgagcccaagcgggcctgcccctcagtcgcggatccatcgacgtcagacgcggaaggagctccggtggactttgccgacaggtaccaaaacaaatgttctcgtcacgcgggcatgcttcagatgctgtttccctgcaagacatgcgagagaatgaatcagaatttcaacatttgcttcacgcacgggaccagagactgttcagaatgtttccccggcgtgtcagaatctcaaccggtcgtcagaaagaggacgtatcggaaactctgtgcgattcatcatctgctggggcgggctcccgagattgcttgctcggcctgcgatctggtcaacgtggacctggatgactgtgtttctgagcaataaatgacttaaaccaggtatggctgccgatggttatcttccagattggctcgaggacaacctctctgagggcattcgcgagtggtgggacttgaaacctggagccccgaaacccaaagccaaccagcaaaagcaggacgacggccggggtctggtgcttcctggctacaagtacctcggacccttcaacggactcgacaagggggagcccgtcaacgcggcggacgcagcggccctcgagcacgacaaagcctacgaccagcagctcaaagcgggtgacaatccgtacctgcggtataatcacgccgacgccgagtttcaggagcgtctgcaagaagatacgtcttttgggggcaacctcgggcgagcagtcttccaggccaagaagcgggttctcgaacctctcggtctggttgaggaaggcgctaagacggctcctggaaagaagagaccggtagagcagtcgccacaagagccagactcctcctcgggcatcggcaagacaggccagcagcccgctaaaaagagactcaattttggtcagactggcgactcagagtcagtccccgacccacaacctctcggagaacctccagcagccccctcaggtctgggacctaatacaatggcttcaggcggtggcgctccaatggcagacaataacgaaggcgccgacggagtgggtaattcctcgggaaattggcattgcgattccacatggctgggggacagagtcatcaccaccagcacccgaacctgggccctgcccacctacaacaaccacctctacaagcaaatctccaacggcacctcgggaggaagcaccaacgacaacacctattttggctacagcaccccctgggggtattttgacttcaacagattccactgtcacttttcaccacgtgactggcaacgactcatcaacaacaattggggattccggcccaaaagactcaacttcaagctgttcaacatccaggtcaaggaagtcacgacgaacgaaggcaccaagaccatcgccaataatctcaccagcaccgtgcgggtctttacggactcggagtaccagttaccgtacgtgctaggatccgctcaccagggatgtctgcctccgttcccggcggacgtcttcatggttcctcagtacggctatttaactttaaacaatggaagccaagccctgggacgttcctccttctactgtctggagtatttcccatcgcagatgctgagaaccggcaacaactttcagttcagctacaccttcgaggacgtgcctttccacagcagctacgcgcacagccagagcctggacaggctgatgaatcccctcatcgaccagtacctgtactacctggtcagaacgcaaacgactggaactggagggacgcagactctggcattcagccaagcgggtcctagctcaatggccaaccaggctagaaattgggtgcccggaccttgctaccggcagcagcgcgtctccacgacaaccaaccagagcaacaacagcaactttgcctggacgggagctgccaagtttaagctgaacggccgagactctctaatgaatccgggcgtggcaatggcttcccacaaggatgacgacgaccgcttcttcccttcgagcggggtcctgatttttggcaagcaaggagccgggaacgatggagtggattacagccaagtgctgattacagatgaggaagaaatcaaggctaccaaccccgtggccacagaagaatatggagcagtggccatcaacaaccaggccgccaatacgcaggcgcagaccggactcgtgcacaaccagggggtgattcccggcatggtgtggcagaatagagacgtgtacctgcagggtcccatctgggccaaaattcctcacacggacggcaactttcacccgtctcccctgatgggcggctttggactgaagcacccgcctcctcaaattctcatcaagaacacaccggttccagcggacccgccgcttaccttcaaccaggccaagctgaactctttcatcacgcagtacagcaccggacaggtcagcgtggaaatcgagtgggagctgcagaaagaaaacagcaaacgctggaatccagagattcaatacacttccaactactacaaatctacaaatgtggactttgctgtcaacacggaaggagtttatagcgagcctcgccccattggcacccgttacctcacccgcaacctgtaattacatgttaatcaataaaccggttaattcgtttcagttgaactttggtctctgcgaagggcgaattc

SEQ ID NO: 77 - protein, 736 aa, Adeno-associated virus
MAADGYLPDWLEDNLSEGIREWWDLKPGAPKPKANQQKQDDGRGLVLPGYKYLGPFNGLDKGEPVNAADAAALEHDKAYDQQLKAGDNPYLRYNHADAEFQERLQEDTSFGGNLGRAVFQAKKRVLEPLGLVEEGAKTAPGKKRPVEQSPQEPDSSSGIGKTGQQPAKKRLNFGQTGDSESVPDPQPLGEPPAAPSGLGPNTMASGGGAPMADNNEGADGVGNSSGNWHCDSTWLGDRVITTSTRTWALPTYNNHLYKQISNGTSGGSTNDNTYFGYSTPWGYFDFNRFHCHFSPRDWQRLINNNWGFRPKRLNFKLFNIQVKEVTTNEGTKTIANNLTSTVRVFTDSEYQLPYVLGSAHQGCLPPFPADVFMVPQYGYLTLNNGSQALGRSSFYCLEYFPSQMLRTGNNFQFSYTFEDVPFHSSYAHSQSLDRLMNPLIDQYLYYLVRTQTTGTGGTQTLAFSQAGPSSMANQARNWVPGPCYRQQRVSTTTNQSNNSNFAWTGAAKFKLNGRDSLMNPGVAMASHKDDDDRFFPSSGVLIFGKQGAGNDGVDYSQVLITDEEEIKATNPVATEEYGAVAINNQAANTQAQTGLVHNQGVIPGMVWQNRDVYLQGPIWAKIPHTDGNFHPSPLMGGFGLKHPPPQILIKNTPVPADPPLTFNQAKLNSFITQYSTGQVSVEIEWELQKENSKRWNPEIQYTSNYYKSTNVDFAVNTEGVYSEPRPIGTRYLTRNL

SEQ ID NO: 78 - DNA, 3121 bp, Adeno-associated virus
gaattcgcccttctacggctgcgtcaactggaccaatgagaactttcccttcaacgattgcgtcgacaagatggtgatctggtgggaggagggcaagatgacggccaaggtcgtggagtccgccaaggccattctcggcggcagcaaggtgcgtgtggaccaaaagtgcaagtcttccgcccagatcgatcccacccccgtgatcgtcacctccaacaccaacatgtgcgccgtgattgacgggaacagcaccaccttcgagcaccagcagccgttgcaggaccggatgttcaaatttgaactcacccgccgtctggagcatgactttggcaaggtgacgaagcaggaagtcaaagagttcttccgctgggcgcaggatcacgtgaccgaggtggcgcatgagttccacgtcagaaagggtggcgccaacaagagacccgcccccgatgacgcggatataagcgagcccaagcgggcctgcccctcagtcgcggatccatcgacgtcagacgcggaaggagctccggtggactttgccgacaggtaccaaaacaaatgttctcgtcacgcgggcatgcttcagatgctgtttccctgcaagacatgcgagagaatgaatcagaatttcaacatttgcttcacgcacgggaccagagactgttcagaatgtttccccggcgtgtcagaatctcaaccggtcgtcagaaagaggacgtatcggaaactctgtgcgattcatcatctgctggggcgggctcccgagattgcttgctcggcctgcgatctggtcaacgtggacctggatgactgtgtttctgagcaataaatgacttaaaccaggtatggctgccgatggttatcttccagattggctcgaggacaacctctctgagggcattcgcgagtggtgggacttgaaacctggagccccgaaacccaaagccaaccagcaaaagcaggacgacggccggggtctggtgcttcctggctacaagtacctcggacccttcaacggactcgacaagggggagcccgtcaacgcggcggacgcagcggccctcgagcacgacaaagcctacgaccagcagctcaaagcgggtgacaatccgtacctgcggtataatcacgccgacgccgagtttcaggagcgtctgcaagaagatacgtcctttgggggcaacctcgggcgagcagtcttccaggccaagaagcgggttctcgaacctctcggtctggttgaggaaggcgctaagacggctcctggaaagaagagaccggtagagcagtcgccacaagagccagactcctcctcgggcatcggcaagacaggccagcagcccgctaaaaagagactcaattttggtcagactggcgactcagagtcagtccccgacccacaacctctcggagaacctccagcagccccctcaggtctgggacctaatacaatggcttcaggcggtggcgctccaatggcagacaataacgaaggcgccgacggagtgggtaattcctcgggaaattggcattgcgattccacatggctgggggacagagtcatcaccaccagcacccgaacctgggccctgcccacctacaacaaccacctctacaagcaaatctccaacggcacctcgggaggaagcaccaacgacaacacctattttggctacagcaccccctgggggtattttgacttcaacagattccactgtcacttttcaccacgtgactggcaacgactcatcaacaacaattggggattccggcccaaaagactcaacttcaagctgttcaacatccaggtcaaggaagtcacgacgaacgaaggcaccaagaccatcgccaataatctcaccagcaccgtgcaggtctttacggacttggagtaccagttaccgtacgtgctaggatccgctcaccagggatgtctgcctccgttcccggcggacgtcttcatggttcctcagtacggctatttaactttaaacaatggaagccaagccctgggacgttcctccttctactgtctggagtatttcccatcgcagatgccgagaaccggcaacaactttcagttcagctacaccttcgaggacgtgcctttccacagcagctacgcgcacagccagagcctggacaggctgatgaatcccctcatcgaccagtacctgtactacctggtcagaacgcaaacgactggaactggagggacgcagactctggcattcagccaagcgggtcctagctcaatggccaaccaggctagaaattgggtgcccggaccttgctaccggcagcagcgcgtctccacgacaaccaaccagaacaacaacagcaactttgcctggacgggagctgccaagtttaagctgaacggccgagactctctaatgaatccgggcgtggcaatggcttcccacaaggatgacgacgaccgcttcttcccttcgagcggggtcctgatttttggcaagcaaggagccgggaacgatggagtggattacagccaagtgctgattacagatgaggaagaaatcaaggctaccaaccccgtggccacagaagaatatggagcagtggccatcaacaaccaggccgccaatacgcaggcgcagaccggactcgtgcacaaccagggggtgattcccggcatggtgtggcagaatagagacgtgtacctgcagggtcccatctgggccaaaattcctcacacggacggcaactttcacccgtctcccctgatgggcggctttggactgaagcacccgcctcctcaaattctcatcaagaacacaccggttccagcggacccgccgcttaccttcaaccaggccaagctgaactctttcatcacgcagtacagcaccggacaggtcagcgtggaaatcgagtgggagctgcagaaagaaaacagcaaacgctggaatccagagattcaatacacttccaactactacaaatctacaaatgtggactttgctgtcaacacggaaggagtttatagcgagcctcgccccattggcacccgttacctcacccgcaacctgtaattacatgttaatcaataaaccggttaattcgtttcagttgaactttggtctctgcgaagggcgaattc

SEQ ID NO: 79 - protein, 736 aa, Adeno-associated virus
MAADGYLPDWLEDNLSEGIREWWDLKPGAPKPKANQQKQDDGRGLVLPGYKYLGPFNGLDKGEPVNAADAAALEHDKAYDQQLKAGDNPYLRYNHADAEFQERLQEDTSFGGNLGRAVFQAKKRVLEPLGLVEEGAKTAPGKKRPVEQSPQEPDSSSGIGKTGQQPAKKRLNFGQTGDSESVPDPQPLGEPPAAPSGLGPNTMASGGGAPMADNNEGADGVGNSSGNWHCDSTWLGDRVITTSTRTWALPTYNNHLYKQISNGTSGGSTNDNTYFGYSTPWGYFDFNRFHCHFSPRDWQRLINNNWGFRPKRLNFKLFNIQVKEVTTNEGTKTIANNLTSTVQVFTDLEYQLPYVLGSAHQGCLPPFPADVFMVPQYGYLTLNNGSQALGRSSFYCLEYFPSQMPRTGNNFQFSYTFEDVPFHSSYAHSQSLDRLMNPLIDQYLYYLVRTQTTGTGGTQTLAFSQAGPSSMANQARNWVPGPCYRQQRVSTTTNQNNNSNFAWTGAAKFKLNGRDSLMNPGVAMASHKDDDDRFFPSSGVLIFGKQGAGNDGVDYSQVLITDEEEIKATNPVATEEYGAVAINNQAANTQAQTGLVHNQGVIPGMVWQNRDVYLQGPIWAKIPHTDGNFHPSPLMGGFGLKHPPPQILIKNTPVPADPPLTFNQAKLNSFITQYSTGQVSVEIEWELQKENSKRWNPEIQYTSNYYKSTNVDFAVNTEGVYSEPRPIGTRYLTRNL

SEQ ID NO: 80 - DNA, 3122 bp, Adeno-associated virus
gaattcgccctttctacggctgcgtcaactggaccaatgagaactttcccttcaacgattgcgtcgacaagatggtgatctggtgggaggagggcaagatgacggccaaggtcgtggagtccgccaaggccattctcggcggcagcaaggtgcgtgtggaccaaaagtgcaagtcttccgcccagatcgatcccacccccgtgatcgtcacctccaacaccaacatgtgcgccgtgattgacgggaacagcaccaccttcgagcaccagcagccgttgcaggaccggatgttcaaatttgaactcacccgccgtctggagcatgactttggcaaggtgacgaagcaggaagtcaaagggttcttccgctgggcgcaggatcacgtgaccgaggtggcgcatgagttccacgtgcgagcccaagcgggcctgcccctcagtcgcggatccatcgacgtcagaccagaaagggtggagccaacaagagacccgcccccgatgacgcggatataagcggaaggagctccggtggactttgccgacaggtaccaaaacaaatgttctcgtcacgcgggcatgcttcagatgctgtttccctgcaagacatgcgagagaatgaatcagaatttcaacatttgcttcacgcacgggaccagagactgttcagaatgtttccccggcgtgtcagaatctcaaccggtcgtcagaaagaggacgtatcggaaactctgtgcgattcatcatctgctggggcgggctcccgagattgcttgctcggcctgcgatctggtcaacgtggacctggatgactgtgtttctgagcaataaatgacttaaaccaggtatggctgccgatggttatcttccagattggctcgaggacaacctctctgagggcattcgcgagtggtgggacttgaaacctggagccccgaaacccaaagccaaccagcaaaagcaggacgacggccggggtctggtgcttcctggctacaagtacctcggacccttcaacggactcgacaagggggagcccgtcaacgcggcggacgcagcggccctcgagcacgacaaagcctacgaccagcagctcaaagcgggtgacaatccgtacctgcggtataatcacgccgacgccgagtttcaggagcgtctgcaagaagatacgtcttttgggggcaacctcgggcgagcagtcttccaggccaagaagcgggttctcgaacctctcggtctggttgaggaaggcgctaagacggctcctggaaagaagagaccggtagagcagtcgccacaagagccagactcctcctcgggcatcggcaagacaggccagcagcccgctaaaaagagactcaattttggtcagactggcgactcagagtcagtccccgacccacaacctctcggagaacctccagcagccccctcaggtctgggacctaatacaatggcttcaggcggtggcgctccaatggcagacaataacgaaggcgccgacggagtgggtaattcctcgggaaattggcattgcgattccacatggctgggggacagagtcatcaccaccagcacccgaacctgggccctgcccacctacaacaaccacctctacaagcaaatctccaacggcacctcgggaggaagcaccaacgacaacacctattttggctacagcaccccctgggggtattttgacttcaacagattccactgtcacttttcaccacgtgactggcaacgactcatcaacaacaattggggattccggcccaaaagactcaacttcaagctgttcaacatccaggtcaaggaagtcacgacgaacgaaggcaccaagaccatcgccaataatctcaccagcaccgtgcaggtctttacggactcggagtaccagttaccgtacgtgctaggatccgctcaccagggatgtctgcctccgttcccggcggacgtcttcatggttcctcagtacggctatttaactttaaacaatggaagccaagccctgggacgttcctccttctactgtctggagtatttcccatcgcagatgctgagaaccggcaacaactttcagttcagctacaccttcgaggacgtgcctttccacagcagctacgcgcacagccagagcctggacaggctgatgaatcccctcatcgaccagtacctgtactacctggtcagaacgcaaacgactggaactggagggacgcagactctggcattcagccaagcgggtcctagctcaatggccaaccaggctagaaattgggtgcccggaccttgctaccggcagcagcgcgtctccacgacaaccaaccagaacaacaacagcaactttgcctggacgggagctgccaagtttaagctgaacggccgagactctctaatgaatccgggcgtggcaatggcttcccacaaggatgacgacgaccgcttcttcccttcgagcggggtcctgatttttggcaagcaaggagccgggaacgatggagtggattacagccaagtgctgattacagatgaggaagaaatcaaggctaccaaccccgtggccacagaagaatatggagcagtggccatcaacaaccaggccgccaatacgcaggcgcagaccggactcgtgcacaaccagggggtgattcccggcatggtgtggcagaatagagacgtgtacctgcagggtcccatctgggccaaaattcctcacacggacggcaactttcacccgtctcccctgatgggcggctttggactgaagcacccgcctcctcaaattctcatcaagaacacaccggttccagcggacccgccgcttaccttcaaccaggccaagctgaactctttcatcacgcagtacagcaccggacaggtcagcgtggaaatcgagtgggagctgcagaaagaaaacagcaaacgctggaatccagagattcaatacacttccaactactacaaatctacaaatgtggactttgctgtcaacacggagggggtttatagcgagcctcgccccattggcacccgttacctcacccgcaacctgtaattacatgttaatcaataaaccggttaattcgtttcagttgaactttggtctctgcgaagggcgaattc

SEQ ID NO: 81 - protein, 736 aa, Adeno-associated virus
MAADGYLPDWLEDNLSEGIREWWDLKPGAPKPKANQQKQDDGRGLVLPGYKYLGPFNGLDKGEPVNAADAAALEHDKAYDQQLKAGDNPYLRYNHADAEFQERLQEDTSFGGNLGRAVFQAKKRVLEPLGLVEEGAKTAPGKKRPVEQSPQEPDSSSGIGKTGQQPAKKRLNFGQTGDSESVPDPQPLGEPPAAPSGLGPNTMASGGGAPMADNNEGADGVGNSSGNWHCDSTWLGDRVITTSTRTWALPTYNNHLYKQISNGTSGGSTNDNTYFGYSTPWGYFDFNRFHCHFSPRDWQRLINNNWGFRPKRLNFKLFNIQVKEVTTNEGTKTIANNLTSTVQVFTDSEYQLPYVLGSAHQGCLPPFPADVFMVPQYGYLTLNNGSQALGRSSFYCLEYFPSQMLRTGNNFQFSYTFEDVPFHSSYAHSQSLDRLMNPLIDQYLYYLVRTQTTGTGGTQTLAFSQAGPSSMANQARNWVPGPCYRQQRVSTTTNQNNNSNFAWTGAAKFKLNGRDSLMNPGVAMASHKDDDDRFFPSSGVLIFGKQGAGNDGVDYSQVLITDEEEIKATNPVATEEYGAVAINNQAANTQAQTGLVHNQGVIPGMVWQNRDVYLQGPIWAKIPHTDGNFHPSPLMGGFGLKHPPPQILIKNTPVPADPPLTFNQAKLNSFITQYSTGQVSVEIEWELQKENSKRWNPEIQYTSNYYKSTNVDFAVNTEGVYSEPRPIGTRYLTRNL

SEQ ID NO: 82 - DNA, 2370 bp, Adeno-associated virus
gaattcgccctttctacggctgcgtcaactggaccaatgagaactttcccttcaacgattgcgtcgacaagatggtgatctggtgggaggagggcaagatgacggccaaggtcgtggagtccgccaaggccattctcggcggcagcaaggtgcgcgtggaccaaaagtgcaagtcgtccgcccagatcgaccccacccccgtgatcgtcacctccaacaccaacatgtgcgccgtgattgacgggaacagcaccaccttcgagcaccagcagccgttgcaggaccggatgttcaagttcgaactcacccgccgtctggagcacgactttggcaaggtgaccaagcaggaagtcaaagagttcttccgctgggcgcaggatcacgtgaccgaggtggcgcatgagttctacgtcagaaagggcggagccagcaaaagacccgcccccgatgacgcggatataagcgagcccaagcgggcctgcccctcagtcgcggatccatcgacgtcagacgcggaaggagctccggtggactttgccgacaggtaccaaaacaaatgttctcgtcacgcgggcatgcttcagacgctgtttccctgcaaaacgtgcgagagaatgaatcagaatttcaacatttgcttcacgcacggggtcagagactgctcagaatgtttccccggtgcatcagaatctcaaccggtcgtcagaaaaaaaacgtatcagaaactgtgtgccattcatcatctgctggggcgggcacccgagattgcttgctcggcctgcgatctggtcaacgtggacctggacgactgtgtttctgagcaataaatgacttaaaccaggtatggctgccgatggttatcttccagattggcttgaggacaacctctctgagggcattcgcgagtggtgggacctgaaacctggagccccgaaacccaaagccaaccagcaaaagcaggacgacggccggggtctggtgcttcctggctacaagtacctcggacccttcaacggactcgacaagggggagcccgtcaacgcggcggacgcagcggccctcgagcacgacaaggcctacgaccagcagctcaaagcgggtgacaatccgtacctgcggtataaccacgccgacgccgagtttcaggagcgtctgcaagaagatacgtcttttgggggcaacctcgggcgagcagtcttccaggccaagaagcgggttctcgaacctctcggtctggttgaggaaggcgctaagacggctcctggaaagaagagaccggtagagccatcacctcagcgttcccccgactcctccacgggcatcggcaagaaaggccaccagcccgcgagaaagagactgaactttgggcagactggcgactcggagtcagtccccgaccctcaaccaatcggagaaccaccagcaggcccctctggtctgggatctggtacaatggctgcaggcggtggcgctccaatggcagacaataacgaaggcgccgacggagtgggtagttcctcaggaaattggcattgcgattccacatggctgggcgacagagtcatcaccaccagcacccgaacctgggccctgcccacctacaacaaccatctctacaagcaaatctccaacgggacatcgggaggaagcactaacgacaacacctactttggctacagcaccccctgggggtattttgacttcaacagattccactgccacttctcaccacgtgactggcagcgactcatcaacaataactggggattccggcccaagagactcaacttcaagctcttcaacatccaggtcaaggaggtcacgcagaatgaaggcaccaagaccatcgccaataaccttaccagcacgattcaggtgtttacggactcggaataccagctcccgtacgtcctcggctctgcgcaccagggctgcctccctccgttcccggcggacgtcttcatgattcctcagtacgggtatctgaccctaaacaatggcagtcaggctgtgggccgttcctccttctactgcctggaatacttcccttctcaaatgctgaggacgggcaacaactttgaattcagctacaccttcgaggacgtgcctttccacagcagctacgcgcacagccagagcctggaccggctgatgaaccctctcatcgaccagtacctgtattacttatccagaactcagtccacaggaggaactcaaggtactcagcaattgttattttctcaagccgggcccgcaaacatgtyggctcaggccaagaactggctacctggaccgtgttaccgtcagcaacgagtttccacgacactgtcgcaaaacaacaacagcaattttgctggaccggtgccacca

SEQ ID NO: 83 - protein, 738 aa, Adeno-associated virus; identical to SEQ ID NO: 73

SEQ ID NO: 84 - DNA, 2205 bp, Adeno-associated virus
atgactgacggttaccttccagattggctagaggacaacctctctgaaggcgttcgagagtggtgggcgctgcaacctggagcccctaaacccaaggcaaatcaacaacatcaggacaacgctcggggtcttgtgcttccgggttacaaatacctcggacccggcaacggactcgacaagggggaacccgtcaacgcagcggacgcggcagccctcgagcacgacaaggcctacgaccagcagctcaaggccggtgacaacccctacctcaagtacaaccacgccgacgcggagttccagcagcggcttcagggcgacacatcgtttgggggcaacctcggcagagcagtcttccaggccaaaaagagggttcttgaacctcttggtctggttgagcaagcgggtgagacggctcctggaaagaagagaccgttgattgaatccccccagcagcccgactcctccacgggtatcggcaaaaaaggcaagcagccggctaaaaagaagctcgttttcgaagacgaaactggagcaggcgacggaccccctgagggatcaacttccggagccatgtctgatgacagtgagatgcgtgcagcagctggcggagctgcagtcgagggcggacaaggtgccgatggagtgggtaatgcctcgggtgattggcattgcgattccacctggtctgagggccacgtcacgaccaccagcaccagaacctgggtcttgcccacctacaacaaccacctctacaagcgactcggagagagcctgcagtccaacacctacaacggattctccaccccctggggatactttgacttcaaccgcttccactgccacttctcaccacgtgactggcagcgactcatcaacaacaactggggcatgcgacccaaagccatgcgggtcaaaatcttcaacatccaggtcaaggaggtcacgacgtcgaacggcgagacaacggtggctaataaccttaccagcacggttcagatctttgcggactcgtcgtacgaactgccgtacgtgatggatgcgggtcaagagggcagcctgcctccttttcccaacgacgtctttatggtgccccagtacggctactgtggactggtgaccggcaacacttcgcagcaacagactgacagaaatgccttctactgcctggagtactttccttcgcagatgctgcggactggcaacaactttgaaattacgtacagttttgagaaggtgcctttccactcgatgtacgcgcacagccagagcctggaccggctgatgaaccctctcatcgaccagtacctgtggggactgcaatcgaccaccaccggaaccaccctgaatgccgggactgccaccaccaactttaccaagctgcggcctaccaacttttccaactttaaaaagaactggctgcccgggccttcaatcaagcagcagggcttctcaaagactgccaatcaaaactacaagatccctgccaccgggtcagacagtctcatcaaatacgagacgcacagcactctggacggaagatggagtgccctgacccccggacctccaatggccacggctggacctgcggacagcaagttcagcaacagccagctcatctttgcggggcctaaacagaacggcaacacggccaccgtacccgggactctgatcttcacctctgaggaggagctggcagccaccaacgccaccgatacggacatgtggggcaacctacctggcggtgaccagagcaacagcaacctgccgaccgtggacagactgacagccttgggagccgtgcctggaatggtctggcaaaacagagacatttactaccagggtcccatttgggccaagattcctcataccgatggacactttcacccctcaccgctgattggtgggtttgggctgaaacacccgcctcctcaaatttttatcaagaacaccccggtacctgcgaatcctgcaacgaccttcagctctactccggtaaactccttcattactcagtacagcactggccaggtgtcggtgcagattgactgggagatccagaaggagcggtccaaacgctggaaccccgaggtccagtttacctccaactacggacagcaaaactctctgttgtgggctcccgatgcggctgggaaatacactgagcctagggctatcggtacccgctacctcacccaccacctgtaa

SEQ ID NO: 85 - protein, 734 aa, Adeno-associated virus; identical to SEQ ID NO: 57

SEQ ID NO: 86 - DNA, 3128 bp, Adeno-associated virus
gaattcgccctttctacggctgcgtcaactggaccaatgagaactttcccttcaacgattgcgtcgacaagatgttgatctggtgggaggagggcaagatgacggccaaggtcgtggagtccgccaaggccattctcggcggcagcaaagtgcgcgtggaccaaaagtgcaagccgtccgcccagatcgaccccacccccgtgatcgtcacctccaacaccaacatgtgcgccgtgattgacgggaacagcaccaccttcgagcaccagcagccgttgcgggaccggatgttcaagtttgaactcacccgccgtctggagcacgactttggcaaggtgacaaagcaggaagtcagagagttcttccgctgggcgcaggatcacgtgaccgaggtggcgcacgagttctacgtcagaaagggtggagccaacaagagacccgcccccgatgacgcggataaaagcgagcccaagcgggcctgcccctcagtcgcggatccatcgacgtcagacgcggaaggagctccggtggactttgccgacaggtaccaaaacaaatgttctcgtcacgcgggcatgcttcagatgctgtttccctgcaaaacatgcgagagaatgaatcagaatttcaacatttgcttcacgcacgggaccagagactgttcagaatgtttccccggcgtgtcagaatctcaaccggtcgtcagaaaaaagacgtatcggaaactctgtgcgattcatcatctgctggggcgggcacccgagattgcttgctcggcctgcgatctggtcaacgtggacctagatgactgtgtttctgagcaataaatgacttaaaccaggtatggctgccgatggttatcttccagattggctcgaggacaacctctctgagggcattcgcgagtggtgggacttgaaacctggagccccgaaacccaaagccaaccagcaaaagcaggacgacggccggggtctggtgcttcctggctacaagtacctcggacccttcaacggactcgacaagggggagcccgtcaacgcggcggacgcagcggccctcgagcacgacaaggcctacgaccagcagctcaaagcgggtgacaatccgtacctgcggtataaccacgccgacgccgagtttcaggagcgtctgcaagaagatacgtcttttgggggcaacctcgggcgagcagtcttccaggccaagaagcgggttctcgaacctctcggtctggttgaggaaggcgctaagacggctcctggaaagaagagaccggtagagccatcaccccagcgttctccagactcctctacgggcatcggcaagaaaggccagcagcccgcgaaaaagagactcaactttgggcagactggcgactcagagtcagtgcccgaccctcaaccaatcggagaaccccccgcaggcccctctggtctgggatctggtacaatggctgcaggcggtggcgctccaatggcagacaataacgaaggcgccgacggagtgggtagttcctcaggaaattggcattgcgattccacatggctgggcgacagagtcatcaccaccagcacccgaacctgggccctccccacctacaacaaccacctctacaagcaaatctccaacgggacttcgggaggaagcaccaacgacaacacctacttcggctacagcaccccctgggggtattttgactttaacagattccactgccacttctcaccacgtgactggcagcgactcatcaacaacaactggggattccggcccaagagactcaacttcaagctcttcaacatccaggtcaaggaggtcacgcagaatgaaggcaccaagaccatcgccaataaccttaccagcacgattcaggtctttacggactcggaataccagctcccgtacgtcctcggctctgcgcaccagggctgcctgcctccgttcccggcggacgtcttcatgattcctcagtacgggtacctgactctgaacaatggcagtcaggccgtgggccgttcctccttctactgcctggagtactttccttctcaaatgctgagaacgggcaacaactttgagttcagctaccagtttgaggacgtgccttttcacagcagctacgcgcacagccaaagcctggaccggctgatgaaccccctcatcgaccagtacctgtactacctgtctcggactcagtccacgggaggtaccgcaggaactcagcagttgctattttctcaggccgggcctaataacatgtcggctcaggccaaaaactggctacccgggccctgctaccggcagcaacgcgtctccacgacactgtcgcaaaataacaacagcaactgtaaatcccggtgtcgctatggcaacccacaaggacgacgaagagcgattttgcctggaccggtgccaccaagtatcatctgaatggcagagactctctgttttccgtccagcggagtcttaatgtttgggaaacagggagctggaaaagacaacgtggactatagcagcgttatgctaaccagtgaggaagaaattaaaaccaccaacccagtggccacggaacagtacggcgtggtggccgataacctgcaacagcaaaacgccgctcctattgtaggggccgtcaacagtcaaggagccttacctggcatggtctggcagaaccgggacgtgtacctgcagggtcctatctgggccaagattcctcacacggacggaaactttcatccctcgccgctgatgggaggctttggactgaaacacccgcctcctcagatcctgattaagaatacacctgttcccgcggatcctccaactaccttcagtcaagctaagctggcgtcgttcatcacgcagtacagcaccggacaggtcagcgtggaaattgaatgggagctgcagaaagaaaacagcaaacgctggaacccagagattcaatacacttccaactactacaaatctacaaatgtggacttcgctgttaacacagatggcacttattctgagcctcgccccattggcacccgttacctcacccgtaatctgtaattgctcgttaatcaataaaccggttgattcgtttcagttgaactttggtctctgcgaagggcgaattc

SEQ ID NO: 87 - protein, 738 aa, Adeno-associated virus; identical to SEQ ID NO: 7

SEQ ID NO: 88 - DNA, 3128 bp, Adeno-associated virus
gaattcgccctttctacggctgcgtcaactggaccaatgagaactttcccttcaacgattgcgtcgacaagatggtgatctggtgggaggagggcaagatgacggccaaggtcgtggagtccgccaaggccattctcggcggcagcaaagtgcgcgtggaccaaaagtgcaagtcgtccgcccagatcgaccccacccccgtgatcgtcacctccaacaccaacatgtgcgccgtgattgacgggaacagcaccaccttcgagcaccagcagccgttgcaggaccggatgttcaagtttgaactcacccgccgtctggagcacgactttggcaaggtgacaaagcaggaagtcagagagttcttccgctgggcgcaggatcacgtgaccgaggtggcgcacgagttctacgtcagaaagggtggagccaacaagagacccgcccccgatgacgcggataaaagcgagcccaagcgggcctgcccctcagtcgcggatccatcgacgtcagacgcggaaggagctccggtggactttgccgacaggtaccaaaacaaatgttctcgtcacgcgggcatgcttcagatgctgtttccctgcaaaacatgcgagagaatgaatcagaatttcaacatttgcttcacgcacgggaccagagactgttcagaatgtttccccggcgtgtcagaatctcaaccggttgtcagaaaaaagacgtatcggaaactctgtgcgattcatcatctgctggggcgggcacccgagattgcttgctcggcctgcgatctggtcaacgtggacctagatgactgtgtttctgagcaataaatgacttaaaccaggtatggctgccgatggttatcttccagattggctcgaggacaacctctctgagggcattcgcgagtggtgggacttgaaacctggagccccgaaacccaaagccaaccagcaaaagcaggacgacggccggggtctggtgcttcctggctacaagtacctcggacccttcaacggactcgacaagggggagcccgtcaacgcggcggacgcagcggccctcgagcacgacaaggcctacgaccagcagctcaaagcgggtgacaatccgtacctgcggtataaccacgccgacgccgagtttcaggagcgtctgcaagaagatacgtcttttgggggcaacctcgggcgagcagtcttccaggccaagaagcgggttctcgaacctctcggtctggttgaggaaggcgctaagacggctcctggaaagaagagaccggtagagccatcaccccagcgttctccagactcctctacgggcatcggcaagaaaggccagcagcccgcgaaaaagagactcaactttgggcagactggcgactcagagtcagtgcccgaccctcaaccaatcggagaaccccccgcaggcccctctggtctgggatctggtacaatggctgcaggcggtggcgctccaatggcagacaataacgaaggcgccgacggagtgggtagttcctcaggaaattggcattgcgattccacatggctgggcgacagagtcatcaccaccagcacccgaacctgggccctccccacctacaacaaccacctctacaagcaaatctccaacgggacttcgggaggaagcaccaacgacaacacctacttcggctacagcaccccctgggggtattttgactttaacagattccactgccacttctcaccacgtgactggcagcgactcatcaacaacaactggggattccggcccaagagacccaacttcaagctcttcaacatccaggtcaaggaggtcacgcagaatgaaggcaccaagaccatcgccaataaccttaccagcacgattcaggtctttacggactcggaataccagctcccgtacgtcctcggctctgcgcaccagggctgcctgcctccgttcccggcggacgtcttcatgattcctcagtacgggtacctgactctgaacaatggcagtcaggccgtgggccgttcctccttctactgcctggagtactttccttctcaaatgctgagaacgggcaacaactttgagttcagctaccagtttgaggacgtgccttttcacagcagctacgcgcacagccaaagcctggaccggctgatgaaccccctcatcgaccagtacctgtactacctgtctcggactcagtccacgggaggtaccgcaggaactcagcagttgctattttctcaggccgggcctaataacatgtcggctcaggccaaaaactggctacccgggccctgctaccggcagcaacgcgtctccacgacactgtcgcaaaataacaacagcaactttgcctggaccggtgccaccaagtatcatctgaatggcagagactctctggtaaatcccggtgtcgctatggcaacccacaaggacgacgaagagcgattttttccgtccagcggagtcttaatgtttgggaaacagggagctggaaaagacaacgtggactatagcagcgttatgctaaccagtgaggaagaaattaaaaccaccaacccagtggccacagaacagtacggcgtggtggccgataacctgcaacagcaaaacgccgctcctattgtaggggccgtcaacagtcaaggagccttacctggcatggtctggcagaaccgggacgtgtacctgcagggtcctatctgggccaagattcctcacacggacggaaactttcatccctcgccgctgatgggaggctttggactgaaacacccgcctcctcagatcctgattaagaatacacctgttcccgcggatcctccaactaccttcagtcaagctaagctggcgtcgttcatcacgcagtacagcaccggacaggtcagcgtggaaattgaatgggagctgcagaaagaaaacagcaaacgctggaacccagagattcaatacacttccaactactacaaatctacaaatgtggactttgctgttaacacagatggcacttattctgagcctcgccccattggcacccgttacctcacccgtaatctgtaattgcttgttaatcaataaaccggttgattcgtttcagttgaactttggtctctgcgaagggcgaattc

SEQ ID NO: 89 - protein, 738 aa, Adeno-associated virus
MAADGYLPDWLEDNLSEGIREWWDLKPGAPKPKANQQKQDDGRGLVLPGYKYLGPFNGLDKGEPVNAADAAALEHDKAYDQQLKAGDNPYLRYNHADAEFQERLQEDTSFGGNLGRAVFQAKKRVLEPLGLVEEGAKTAPGKKRPVEPSPQRSPDSSTGIGKKGQQPAKKRLNFGQTGDSESVPDPQPIGEPPAGPSGLGSGTMAAGGGAPMADNNEGADGVGSSSGNWHCDSTWLGDRVITTSTRTWALPTYNNHLYKQISNGTSGGSTNDNTYFGYSTPWGYFDFNRFHCHFSPRDWQRLINNNWGFRPKRPNFKLFNIQVKEVTQNEGTKTIANNLTSTIQVFTDSEYQLPYVLGSAHQGCLPPFPADVFMIPQYGYLTLNNGSQAVGRSSFYCLEYFPSQMLRTGNNFEFSYQFEDVPFHSSYAHSQSLDRLMNPLIDQYLYYLSRTQSTGGTAGTQQLLFSQAGPNNMSAQAKNWLPGPCYRQQRVSTTLSQNNNSNFAWTGATKYHLNGRDSLVNPGVAMATHKDDEERFFPSSGVLMFGKQGAGKDNVDYSSVMLTSEEEIKTTNPVATEQYGVVADNLQQQNAAPIVGAVNSQGALPGMVWQNRDVYLQGPIWAKIPHTDGNFHPSPLMGGFGLKHPPPQILIKNTPVPADPPTTFSQAKLASFITQYSTGQVSVEIEWELQKENSKRWNPEIQYTSNYYKSTNVDFAVNTDGTYSEPRPIGTRYLTRNL

SEQ ID NO: 90 - protein, 738 aa, Adeno-associated virus
MAADGYLPDWLEDNLSEGIREWWDLKPGAPKPKANQQKQDDGRGLVLPGYKYLGPFNGLDKGEPVNAADAAALEHDKAYDQQLKAGDNPYLRYNHADAEFQERLQEDTSFGGNLGRAVFQAKKRVLEPLGLVEEAAKTAPGKKRPVEPSPQRSPDSSTGIGKKGQQPAKKRLNFGQTGDSESVPDPQPIGEPPAGPSGLGSGTMAAGGGAPMADNNEGADGVGSSSGNWHCDSTWLGDRVITTSTRTWALPTYNNHLYKQISNGTSGGSTNDNTYFGYSTPWGYFDFNRFHCHFSPRDWQRLINNNWGFRPKRLSFKLFNIQVKEVTQNEGTKTIANNLTSTIQVFTDSEYQLPYVLGSAHQGCLPPFPADVFMIPQYGYLTLNNGSQAVGRSSFYCLEYFPSQMLRTGNNFEFSYTFEDVPFHSSYAHSQSLDRLMNPLIDQYLYYLSRTQSTGGTQGTQQLLFSQAGPANMSAQAKNWLPGPCYRQQRVSTTLSQNNNSNFAWTGATKYHLNGRDSLVNPGVAMATHKDDEERFFPSSGVLMFGKQGAGRDNVDYSSVMLTSEEEIKTTNPVATEQYGVVADNLQQTNTGPIVGNVNSQGALPGMVWQNRDVYLQGPIWAKIPHTDGNFHPSPLMGGFGLKHPPPQILIKNTPVPADPPTTFSQAKLASFITQYSTGQVSVEIEWELQKENSKRWNPEIQYTSNYYKSTNVDFAVNTEGTYSEPRPIGTRYLTRNL

SEQ ID NO: 91 - DNA, 2172 bp, Artificial Sequence
  Description of Artificial Sequence: Synthetic polynucleotide
atgtcttttgttgatcaccctccagattggttggaagaagttggtgaaggtcttcgcgagtttttgggccttgaagcgggcccaccgaaaccaaaacccaatcagcagcatcaagatcaagcccgtggtcttgtgctgcctggttataactatctcggacccggaaacggtctcgatcgaggagagcctgtcaacagggcagacgaggtcgcgcgagagcacgacatctcgtacaacgagcagcttgaggcgggagacaacccctacctcaagtacaaccacgcggacgccgagtttcaggagaagctcgccgacgacacatccttcgggggaaacctcggaaaggcagtctttcaggccaagaaaagggttctcgaaccttttggcctggttgaagagggtgctaagacggcccctaccggaaagcggatagacgaccactttccaaaaagaaagaaggctcggaccgaagaggactccaagccttccacctcgtcagacgccgaagctggacccagcggatcccagcagctgcaaatcccagcccaaccagcctcaagtttgggagctgatacaatgtctgcgggaggtggcggcccattgggcgacaataaccaaggtgccgatggagtgggcaatgcctcgggagattggcattgcgattccacgtggatgggggacagagtcgtcaccaagtccacccgaacctgggtgctgcccagctacaacaaccaccagtaccgagagatcaaaagcggctccgtcgacggaagcaacgccaacgcctactttggatacagcaccccctgggggtactttgactttaaccgcttccacagccactggagcccccgagactggcaaagactcatcaacaactactggggcttcagaccccggtccctcagagtcaaaatcttcaacattcaagtcaaagaggtcacggtgcaggactccaccaccaccatcgccaacaacctcacctccaccgtccaagtgtttacggacgacgactaccagctgccctacgtcgtcggcaacgggaccgagggatgcctgccggccttccctccgcaggtctttacgctgccgcagtacggttacgcgacgctgaaccgcgacaacacagaaaatcccaccgagaggagcagcttcttctgcctagagtactttcccagcaagatgctgagaacgggcaacaactttgagtttacctacaactttgaggaggtgcccttccactccagcttcgctcccagtcagaacctgttcaagctggccaacccgctggtggaccagtacttgtaccgcttcgtgagcacaaataacactggcggagtccagttcaacaagaacctggccgggagatacgccaacacctacaaaaactggttcccggggcccatgggccgaacccagggctggaacctgggctccggggtcaaccgcgccagtgtcagcgccttcgccacgaccaataggatggagctcgagggcgcgagttaccaggtgcccccgcagccgaacggcatgaccaacaacctccagggcagcaacacctatgccctggagaacactatgatcttcaacagccagccggcgaacccgggcaccaccgccacgtacctcgagggcaacatgctcatcaccagcgagagcgagacgcagccggtgaaccgcgtggcgtacaacgtcggcgggcagatggccaccaacaaccagagctccaccactgcccccgcgaccggcacgtacaacctccaggaaatcgtgcccggcagcgtgtggatggagagggacgtgtacctccaaggacccatctgggccaagatcccagagacgggggcgcactttcacccctctccggccatgggcggattcggactcaaacacccaccgcccatgatgctcatcaagaacacgcctgtgcccggaaatatcaccagcttctcggacgtgcccgtcagcagcttcatcacccagtacagcaccgggcaggtcaccgtggagatggagtgggagctcaagaaggaaaactccaagaggtggaacccagagatccagtacacaaacaactacaacgacccccagtttgtggactttgccccggacagcaccggggaatacagaaccaccagacctatcggaacccgataccttacccgacccctt

SEQ ID NO: 92 - protein, 720 aa, Adeno-associated virus
MSFVDHPPDWLEEVGEGLREFLGLEAGPPKPKPNQQHQDQARGLVLPGYNYLGPGNGLDRGEPVNRADEVAREHDISYNEQLEAGDNPYLKYNHADAEFQEKLADDTSFGGNLGKAVFQAKKRVLEPFGLVEEGAKTAPTGKRIDDHFPKRKKARTEEDSKPSTSSDAEAGPSGSQQLQIPAQPASSLGADTMSAGGGGPLGDNNQGADGVGNASGDWHCDSTWMGDRVVTKSTRTWVLPSYNNHQYREIKSGSVDGSNANAYFGYSTPWGYFDFNRFHSHWSPRDWQRLINNYWGFRPRSLRVKIFNIQVKEVTVQDSTTTIANNLTSTVQVFTDDDYQLPYVVGNGTEGCLPAFPPQVFTLPQYGYATLNRDNTENPTERSSFFCLEYFPSKMLRTGNNFEFTYNFEEVPFHSSFAPSQNLFKLANPLVDQYLYRFVSTNNTGGVQFNKNLAGRYANTYKNWFPGPMGRTQGWNLGSGVNRASVSAFATTNRMELEGASYQVPPQPNGMTNNLQGSNTYALENTMIFNSQPANPGTTATYLEGNMLITSESETQPVNRVAYNVGGQMATNNQSSTTAPATGTYNLQEIVPGSVWMERDVYLQGPIWAKIPETGAHFHPSPAMGGFGLKHPPPMMLIKNTPVPGNITSFSDVPVSSFITQYSTGQVTVEMEWELKKENSKRWNPEIQYTNNYNDPQFVDFAPDSTGEYRTTRPIGTRYL

SEQ ID NO: 93 - protein, 724 aa, Adeno-associated virus 5
MSFVDHPPDWLEEVGEGLREFLGLEAGPPKPKPNQQHQDQARGLVLPGYNYLGPGNGLDRGEPVNRADEVAREHDISYNEQLEAGDNPYLKYNHADAEFQEKLADDTSFGGNLGKAVFQAKKRVLEPFGLVEEGAKTAPTGKRIDDHFPKRKKARTEEDSKPSTSSDAEAGPSGSQQLQIPAQPASSLGADTMSAGGGGPLGDNNQGADGVGNASGDWHCDSTWMGDRVVTKSTRTWVLPSYNNHQYREIKSGSVDGSNANAYFGYSTPWGYFDFNRFHSHWSPRDWQRLINNYWGFRPRSLRVKIFNIQVKEVTVQDSTTTIANNLTSTVQVFTDDDYQLPYVVGNGTEGCLPAFPPQVFTLPQYGYATLNRDNTENPTERSSFFCLEYFPSKMLRTGNNFEFTYNFEEVPFHSSFAPSQNLFKLANPLVDQYLYRFVSTNNTGGVQFNKNLAGRYANTYKNWFPGPMGRTQGWNLGSGVNRASVSAFATTNRMELEGASYQVPPQPNGMTNNLQGSNTYALENTMIFNSQPANPGTTATYLEGNMLITSESETQPVNRVAYNVGGQMATNNQSSTTAPATGTYNLQEIVPGSVWMERDVYLQGPIWAKIPETGAHFHPSPAMGGFGLKHPPPMMLIKNTPVPGNITSFSDVPVSSFITQYSTGQVTVEMEWELKKENSKRWNPEIQYTNNYNDPQFVDFAPDSTGEYRTTRPIGTRYLTRPL

SEQ ID NO: 94 - DNA, 2175 bp, Adeno-associated virus 5
atgtcttttgttgatcaccctccagattggttggaagaagttggtgaaggtcttcgcgagtttttgggccttgaagcgggcccaccgaaaccaaaacccaatcagcagcatcaagatcaagcccgtggtcttgtgctgcctggttataactatctcggacccggaaacggtctcgatcgaggagagcctgtcaacagggcagacgaggtcgcgcgagagcacgacatctcgtacaacgagcagcttgaggcgggagacaacccctacctcaagtacaaccacgcggacgccgagtttcaggagaagctcgccgacgacacatccttcgggggaaacctcggaaaggcagtctttcaggccaagaaaagggttctcgaaccttttggcctggttgaagagggtgctaagacggcccctaccggaaagcggatagacgaccactttccaaaaagaaagaaggctcggaccgaagaggactccaagccttccacctcgtcagacgccgaagctggacccagcggatcccagcagctgcaaatcccagcccaaccagcctcaagtttgggagctgatacaatgtctgcgggaggtggcggcccattgggcgacaataaccaaggtgccgatggagtgggcaatgcctcgggagattggcattgcgattccacgtggatgggggacagagtcgtcaccaagtccacccgaacctgggtgctgcccagctacaacaaccaccagtaccgagagatcaaaagcggctccgtcgacggaagcaacgccaacgcctactttggatacagcaccccctgggggtactttgactttaaccgcttccacagccactggagcccccgagactggcaaagactcatcaacaactactggggcttcagaccccggtccctcagagtcaaaatcttcaacattcaagtcaaagaggtcacggtgcaggactccaccaccaccatcgccaacaacctcacctccaccgtccaagtgtttacggacgacgactaccagctgccctacgtcgtcggcaacgggaccgagggatgcctgccggccttccctccgcaggtctttacgctgccgcagtacggttacgcgacgctgaaccgcgacaacacagaaaatcccaccgagaggagcagcttcttctgcctagagtactttcccagcaagatgctgagaacgggcaacaactttgagtttacctacaactttgaggaggtgcccttccactccagcttcgctcccagtcagaacctgttcaagctggccaacccgctggtggaccagtacttgtaccgcttcgtgagcacaaataacactggcggagtccagttcaacaagaacctggccgggagatacgccaacacctacaaaaactggttcccggggcccatgggccgaacccagggctggaacctgggctccggggtcaaccgcgccagtgtcagcgccttcgccacgaccaataggatggagctcgagggcgcgagttaccaggtgcccccgcagccgaacggcatgaccaacaacctccagggcagcaacacctatgccctggagaacactatgatcttcaacagccagccggcgaacccgggcaccaccgccacgtacctcgagggcaacatgctcatcaccagcgagagcgagacgcagccggtgaaccgcgtggcgtacaacgtcggcgggcagatggccaccaacaaccagagctccaccactgcccccgcgaccggcacgtacaacctccaggaaatcgtgcccggcagcgtgtggatggagagggacgtgtacctccaaggacccatctgggccaagatcccagagacgggggcgcactttcacccctctccggccatgggcggattcggactcaaacacccaccgcccatgatgctcatcaagaacacgcctgtgcccggaaatatcaccagcttctcggacgtgcccgtcagcagcttcatcacccagtacagcaccgggcaggtcaccgtggagatggagtgggagctcaagaaggaaaactccaagaggtggaacccagagatccagtacacaaacaactacaacgacccccagtttgtggactttgccccggacagcaccggggaatacagaaccaccagacctatcggaacccgataccttacccgacccctttaa

SEQ ID NO: 95 - DNA, 2208 bp, Adeno-associated virus 6
atggctgccgatggttatcttccagattggctcgaggacaacctctctgagggcattcgcgagtggtgggacttgaaacctggagccccgaaacccaaagccaaccagcaaaagcaggacgacggccggggtctggtgcttcctggctacaagtacctcggacccttcaacggactcgacaagggggagcccgtcaacgcggcggatgcagcggccctcgagcacgacaaggcctacgaccagcagctcaaagcgggtgacaatccgtacctgcggtataaccacgccgacgccgagtttcaggagcgtctgcaagaagatacgtcttttgggggcaacctcgggcgagcagtcttccaggccaagaagagggttctcgaaccttttggtctggttgaggaaggtgctaagacggctcctggaaagaaacgtccggtagagcagtcgccacaagagccagactcctcctcgggcattggcaagacaggccagcagcccgctaaaaagagactcaattttggtcagactggcgactcagagtcagtccccgacccacaacctctcggagaacctccagcaacccccgctgctgtgggacctactacaatggcttcaggcggtggcgcaccaatggcagacaataacgaaggcgccgacggagtgggtaatgcctcaggaaattggcattgcgattccacatggctgggcgacagagtcatcaccaccagcacccgaacatgggccttgcccacctataacaaccacctctacaagcaaatctccagtgcttcaacgggggccagcaacgacaaccactacttcggctacagcaccccctgggggtattttgatttcaacagattccactgccatttctcaccacgtgactggcagcgactcatcaacaacaattggggattccggcccaagagactcaacttcaagctcttcaacatccaagtcaaggaggtcacgacgaatgatggcgtcacgaccatcgctaataaccttaccagcacggttcaagtcttctcggactcggagtaccagttgccgtacgtcctcggctctgcgcaccagggctgcctccctccgttcccggcggacgtgttcatgattccgcagtacggctacctaacgctcaacaatggcagccaggcagtgggacggtcatccttttactgcctggaatatttcccatcgcagatgctgagaacgggcaataactttaccttcagctacaccttcgaggacgtgcctttccacagcagctacgcgcacagccagagcctggaccggctgatgaatcctctcatcgaccagtacctgtattacctgaacagaactcagaatcagtccggaagtgcccaaaacaaggacttgctgtttagccgggggtctccagctggcatgtctgttcagcccaaaaactggctacctggaccctgttaccggcagcagcgcgtttctaaaacaaaaacagacaacaacaacagcaactttacctggactggtgcttcaaaatataaccttaatgggcgtgaatctataatcaaccctggcactgctatggcctcacacaaagacgacaaagacaagttctttcccatgagcggtgtcatgatttttggaaaggagagcgccggagcttcaaacactgcattggacaatgtcatgatcacagacgaagaggaaatcaaagccactaaccccgtggccaccgaaagatttgggactgtggcagtcaatctccagagcagcagcacagaccctgcgaccggagatgtgcatgttatgggagccttacctggaatggtgtggcaagacagagacgtatacctgcagggtcctatttgggccaaaattcctcacacggatggacactttcacccgtctcctctcatgggcggctttggacttaagcacccgcctcctcagatcctcatcaaaaacacgcctgttcctgcgaatcctccggcagagttttcggctacaaagtttgcttcattcatcacccagtattccacaggacaagtgagcgtggagattgaatgggagctgcagaaagaaaacagcaaacgctggaatcccgaagtgcagtatacatctaactatgcaaaatctgccaacgttgatttcactgtggacaacaatggactttatactgagcctcgccccattggcacccgttacctcacccgtcccctg

SEQ ID NO: 96 - protein, 736 aa, Adeno-associated virus 6
MAADGYLPDWLEDNLSEGIREWWDLKPGAPKPKANQQKQDDGRGLVLPGYKYLGPFNGLDKGEPVNAADAAALEHDKAYDQQLKAGDNPYLRYNHADAEFQERLQEDTSFGGNLGRAVFQAKKRVLEPFGLVEEGAKTAPGKKRPVEQSPQEPDSSSGIGKTGQQPAKKRLNFGQTGDSESVPDPQPLGEPPATPAAVGPTTMASGGGAPMADNNEGADGVGNASGNWHCDSTWLGDRVITTSTRTWALPTYNNHLYKQISSASTGASNDNHYFGYSTPWGYFDFNRFHCHFSPRDWQRLINNNWGFRPKRLNFKLFNIQVKEVTTNDGVTTIANNLTSTVQVFSDSEYQLPYVLGSAHQGCLPPFPADVFMIPQYGYLTLNNGSQAVGRSSFYCLEYFPSQMLRTGNNFTFSYTFEDVPFHSSYAHSQSLDRLMNPLIDQYLYYLNRTQNQSGSAQNKDLLFSRGSPAGMSVQPKNWLPGPCYRQQRVSKTKTDNNNSNFTWTGASKYNLNGRESIINPGTAMASHKDDKDKFFPMSGVMIFGKESAGASNTALDNVMITDEEEIKATNPVATERFGTVAVNLQSSSTDPATGDVHVMGALPGMVWQDRDVYLQGPIWAKIPHTDGHFHPSPLMGGFGLKHPPPQILIKNTPVPANPPAEFSATKFASFITQYSTGQVSVEIEWELQKENSKRWNPEVQYTSNYAKSANVDFTVDNNGLYTEPRPIGTRYLTRPL

SEQ ID NO: 97 - protein, 623 aa, Adeno-associated virus 6
MPGFYEIVIKVPSDLDEHLPGISDSFVNWVAEKEWELPPDSDMDLNLIEQAPLTVAEKLQRDFLVQWRRVSKAPEALFFVQFEKGESYFHLHILVETTGVKSMVLGRFLSQIRDKLVQTIYRGIEPTLPNWFAVTKTRNGAGGGNKVVDECYIPNYLLPKTQPELQWAWTNMEEYISACLNLAERKRLVAHDLTHVSQTQEQNKENLNPNSDAPVIRSKTSARYMELVGWLVDRGITSEKQWIQEDQASYISFNAASNSRSQIKAALDNAGKIMALTKSAPDYLVGPAPPADIKTNRIYRILELNGYDPAYAGSVFLGWAQKRFGKRNTIWLFGPATTGKTNIAEAIAHAVPFYGCVNWTNENFPFNDCVDKMVIWWEEGKMTAKVVESAKAILGGSKVRVDQKCKSSAQIDPTPVIVTSNTNMCAVIDGNSTTFEHQQPLQDRMFKFELTRRLEHDFGKVTKQEVKEFFRWAQDHVTEVAHEFYVRKGGANKRPAPDDADKSEPKRACPSVADPSTSDAEGAPVDFADRYQNKCSRHAGMLQMLFPCKTCERMNQNFNICFTHGTRDCSECFPGVSESQPVVRKRTYRKLCAIHHLLGRAPEIACSACDLVNVDLDDCVSEQ

SEQ ID NO: 98 - DNA, 4683 bp, Adeno-associated virus 6
ttggccactccctctctgcgcgctcgctcgctcactgaggccgggcgaccaaaggtcgcccgacgcccgggctttgcccgggcggcctcagtgagcgagcgagcgcgcagagagggagtggccaactccatcactaggggttcctggaggggtggagtcgtgacgtgaattacgtcatagggttagggaggtcctgtattagaggtcacgtgagtgttttgcgacattttgcgacaccatgtggtcacgctgggtatttaagcccgagtgagcacgcagggtctccattttgaagcgggaggtttgaacgcgcagcgccatgccggggttttacgagattgtgattaaggtccccagcgaccttgacgagcatctgcccggcatttctgacagctttgtgaactgggtggccgagaaggaatgggagttgccgccagattctgacatggatctgaatctgattgagcaggcacccctgaccgtggccgagaagctgcagcgcgacttcctggtccagtggcgccgcgtgagtaaggccccggaggccctcttctttgttcagttcgagaagggcgagtcctacttccacctccatattctggtggagaccacgggggtcaaatccatggtgctgggccgcttcctgagtcagattagggacaagctggtgcagaccatctaccgcgggatcgagccgaccctgcccaactggttcgcggtgaccaagacgcgtaatggcgccggaggggggaacaaggtggtggacgagtgctacatccccaactacctcctgcccaagactcagcccgagctgcagtgggcgtggactaacatggaggagtatataagcgcgtgtttaaacctggccgagcgcaaacggctcgtggcgcacgacctgacccacgtcagccagacccaggagcagaacaaggagaatctgaaccccaattctgacgcgcctgtcatccggtcaaaaacctccgcacgctacatggagctggtcgggtggctggtggaccggggcatcacctccgagaagcagtggatccaggaggaccaggcctcgtacatctccttcaacgccgcctccaactcgcggtcccagatcaaggccgctctggacaatgccggcaagatcatggcgctgaccaaatccgcgcccgactacctggtaggccccgctccgcccgccgacattaaaaccaaccgcatttaccgcatcctggagctgaacggctacgaccctgcctacgccggctccgtctttctcggctgggcccagaaaaggttcggaaaacgcaacaccatctggctgtttgggccggccaccacgggcaagaccaacatcgcggaagccatcgcccacgccgtgcccttctacggctgcgtcaactggaccaatgagaactttcccttcaacgattgcgtcgacaagatggtgatctggtgggaggagggcaagatgacggccaaggtcgtggagtccgccaaggccattctcggcggcagcaaggtgcgcgtggaccaaaagtgcaagtcgtccgcccagatcgatcccacccccgtgatcgtcacctccaacaccaacatgtgcgccgtgattgacgggaacagcaccaccttcgagcaccagcagccgttgcaggaccggatgttcaaatttgaactcacccgccgtctggagcatgactttggcaaggtgacaaagcaggaagtcaaagagttcttccgctgggcgcaggatcacgtgaccgaggtggcgcatgagttctacgtcagaaagggtggagccaacaagagacccgcccccgatgacgcggataaaagcgagcccaagcgggcctgcccctcagtcgcggatccatcgacgtcagacgcggaaggagctccggtggactttgccgacaggtaccaaaacaaatgttctcgtcacgcgggcatgcttcagatgctgtttccctgcaaaacatgcgagagaatgaatcagaatttcaacatttgcttcacgcacgggaccagagactgttcagaatgtttccccggcgtgtcagaatctcaaccggtcgtcagaaagaggacgtatcggaaactctgtgccattcatcatctgctggggcgggctcccgagattgcttgctcggcctgcgatctggtcaacgtggatctggatgactgtgtttctgagcaataaatgacttaaaccaggtatggctgccgatggttatcttccagattggctcgaggacaacctctctgagggcattcgcgagtggtgggacttgaaacctggagccccgaaacccaaagccaaccagcaaaagcaggacgacggccggggtctggtgcttcctggctacaagtacctcggacccttcaacggactcgacaagggggagcccgtcaacgcggcggatgcagcggccctcgagcacgacaaggcctacgaccagcagctcaaagcgggtgacaatccgtacctgcggtataaccacgccgacgccgagtttcaggagcgtctgcaagaagatacgtcttttgggggcaacctcgggcgagcagtcttccaggccaagaagagggttctcgaaccttttggtctggttgaggaaggtgctaagacggctcctggaaagaaacgtccggtagagcagtcgccacaagagccagactcctcctcgggcattggcaagacaggccagcagcccgctaaaaagagactcaattttggtcagactggcgactcagagtcagtccccgacccacaacctctcggagaacctccagcaacccccgctgctgtgggacctactacaatggcttcaggcggtggcgcaccaatggcagacaataacgaaggcgccgacggagtgggtaatgcctcaggaaattggcattgcgattccacatggctgggcgacagagtcatcaccaccagcacccgaacatgggccttgcccacctataacaaccacctctacaagcaaatctccagtgcttcaacgggggccagcaacgacaaccactacttcggctacagcaccccctgggggtattttgatttcaacagattccactgccatttctcaccacgtgactggcagcgactcatcaacaacaattggggattccggcccaagagactcaacttcaagctcttcaacatccaagtcaaggaggtcacgacgaatgatggcgtcacgaccatcgctaataaccttaccagcacggttcaagtcttctcggactcggagtaccagttgccgtacgtcctcggctctgcgcaccagggctgcctccctccgttcccggcggacgtgttcatgattccgcagtacggctacctaacgctcaacaatggcagccaggcagtgggacggtcatccttttactgcctggaatatttcccatcgcagatgctgagaacgggcaataactttaccttcagctacaccttcgaggacgtgcctttccacagcagctacgcgcacagccagagcctggaccggctgatgaatcctctcatcgaccagtacctgtattacctgaacagaactcagaatcagtccggaagtgcccaaaacaaggacttgctgtttagccgggggtctccagctggcatgtctgttcagcccaaaaactggctacctggaccctgttaccggcagcagcgcgtttctaaaacaaaaacagacaacaacaacagcaactttacctggactggtgcttcaaaatataaccttaatgggcgtgaatctataatcaaccctggcactgctatggcctcacacaaagacgacaaagacaagttctttcccatgagcggtgtcatgatttttggaaaggagagcgccggagcttcaaacactgcattggacaatgtcatgatcacagacgaagaggaaatcaaagccactaaccccgtggccaccgaaagatttgggactgtggcagtcaatctccagagcagcagcacagaccctgcgaccggagatgtgcatgttatgggagccttacctggaatggtgtggcaagacagagacgtatacctgcagggtcctatttgggccaaaattcctcacacggatggacactttcacccgtctcctctcatgggcggctttggacttaagcacccgcctcctcagatcctcatcaaaaacacgcctgttcctgcgaatcctccggcagagttttcggctacaaagtttgcttcattcatcacccagtattccacaggacaagtgagcgtggagattgaatgggagctgcagaaagaaaacagcaaacgctggaatcccgaagtgcagtatacatctaactatgcaaaatctgccaacgttgatttcactgtggacaacaatggactttatactgagcctcgccccattggcacccgttacctcacccgtcccctgtaattgtgtgttaatcaataaaccggttaattcgtgtcagttgaactttggtctcatgtcgttattatcttatctggtcaccatagcaaccggttacacattaactgcttagttgcgcttcgcgaatacccctagtgatggagttgcccactccctctatgcgcgctcgctcgctcggtggggccggcagagcagagctctgccgtctgcggacctttggtccgcaggccccaccgagcgagcgagcgcgcatagagggagtgggcaa

SEQ ID NO: 99 - DNA, 2211 bp, Adeno-associated virus 6
atggctgccgatggttatcttccagattggctcgaggacaacctctctgagggcattcgcgagtggtgggacttgaaacctggagccccgaaacccaaagccaaccagcaaaagcaggacgacggccggggtctggtgcttcctggctacaagtacctcggacccttcaacggactcgacaagggggagcccgtcaacgcggcggatgcagcggccctcgagcacgacaaggcctacgaccagcagctcaaagcgggtgacaatccgtacctgcggtataaccacgccgacgccgagtttcaggagcgtctgcaagaagatacgtcttttgggggcaacctcgggcgagcagtcttccaggccaagaagagggttctcgaaccttttggtctggttgaggaaggtgctaagacggctcctggaaagaaacgtccggtagagcagtcgccacaagagccagactcctcctcgggcattggcaagacaggccagcagcccgctaaaaagagactcaattttggtcagactggcgactcagagtcagtccccgacccacaacctctcggagaacctccagcaacccccgctgctgtgggacctactacaatggcttcaggcggtggcgcaccaatggcagacaataacgaaggcgccgacggagtgggtaatgcctcaggaaattggcattgcgattccacatggctgggcgacagagtcatcaccaccagcacccgaacatgggccttgcccacctataacaaccacctctacaagcaaatctccagtgcttcaacgggggccagcaacgacaaccactacttcggctacagcaccccctgggggtattttgatttcaacagattccactgccatttctcaccacgtgactggcagcgactcatcaacaacaattggggattccggcccaagagactcaacttcaagctcttcaacatccaagtcaaggaggtcacgacgaatgatggcgtcacgaccatcgctaataaccttaccagcacggttcaagtcttctcggactcggagtaccagttgccgtacgtcctcggctctgcgcaccagggctgcctccctccgttcccggcggacgtgttcatgattccgcagtacggctacctaacgctcaacaatggcagccaggcagtgggacggtcatccttttactgcctggaatatttcccatcgcagatgctgagaacgggcaataactttaccttcagctacaccttcgaggacgtgcctttccacagcagctacgcgcacagccagagcctggaccggctgatgaatcctctcatcgaccagtacctgtattacctgaacagaactcagaatcagtccggaagtgcccaaaacaaggacttgctgtttagccgggggtctccagctggcatgtctgttcagcccaaaaactggctacctggaccctgttaccggcagcagcgcgtttctaaaacaaaaacagacaacaacaacagcaactttacctggactggtgcttcaaaatataaccttaatgggcgtgaatctataatcaaccctggcactgctatggcctcacacaaagacgacaaagacaagttctttcccatgagcggtgtcatgatttttggaaaggagagcgccggagcttcaaacactgcattggacaatgtcatgatcacagacgaagaggaaatcaaagccactaaccccgtggccaccgaaagatttgggactgtggcagtcaatctccagagcagcagcacagaccctgcgaccggagatgtgcatgttatgggagccttacctggaatggtgtggcaagacagagacgtatacctgcagggtcctatttgggccaaaattcctcacacggatggacactttcacccgtctcctctcatgggcggctttggacttaagcacccgcctcctcagatcctcatcaaaaacacgcctgttcctgcgaatcctccggcagagttttcggctacaaagtttgcttcattcatcacccagtattccacaggacaagtgagcgtggagattgaatgggagctgcagaaagaaaacagcaaacgctggaatcccgaagtgcagtatacatctaactatgcaaaatctgccaacgttgatttcactgtggacaacaatggactttatactgagcctcgccccattggcacccgttacctcacccgtcccctgtaa

SEQ ID NO: 100 - protein, 736 aa, Adeno-associated virus; identical to SEQ ID NO: 96

SEQ ID NO: 101 - protein, 736 aa, Adeno-associated virus
MAADGYLPDWLEDNLSEGIREWWDLKPGAPKPKANQQKQDDGRGLVLPGYKYLGPFNGLDKGEPVNAADAAALEHDKAYDQQLKAGDNPYLRYNHADAEFQERLQEDTSFGGNLGRAVFQAKKRVLEPFGLVEEGAKTAPGKKRPVEQSPQEPDSSSGIGKTGQQPAKKRLNFGQTGDSESVPDPQPLGEPPATPAAVGPTTMASGGGAPMADNNEGADGVGNASGNWHCDSTWLGDRVITTSTRTWALPTYNNHLYKQISSASTGASNDNHYFGYSTPWGYFDFNRFHCHFSPRDWQRLINNNWGFRPKRLNFKLFNIQVKEVTTNDGVTTIANNLTSTVQVFSDSEYQLPYVLGSAHQGCLPPFPADVFMIPQYGYLTLNNGSQAVGRSSFYCLEYFPSQMLRTGNNFTFSYTFEDVPFHSSYAHSQSLDRLMNPLIDQYLYYLNRTQNQSGSAQNKDLLFSRGSPAGMSVQPKNWLPGPCYRQQRVSKTKTDNNNSNFTWTGASKYNLNGRESIINPGTAMASHKDDEDKFFPMSGVMIFGKESAGASNTALDNVMITDEEEIKATNPVATERFGTVAVNLQSSSTDPATGDVHVMGALPGMVWQDRDVYLQGPIWAKIPHTDGHFHPSPLMGGFGLKHPPPQILIKNTPVPANPPAEFSATKFASFITQYSTGQVSVEIEWELQKENSKRWNPEVQYTSNYAKSANVDFTVDNNGLYTEPRPIGTRYLTRPL

SEQ ID NO: 102 - protein, 736 aa, Adeno-associated virus
MAADGYLPDWLEDNLSEGIREWWDLKPGAPKPKANQQKQDDGRGLVLPGYKYLGPFNGLDKGEPVNAADAAALEHDKAYDQQLKAGDNPYLRYNHADAEFQERLQEDTSFGGNLGRAVFQAKKRVLEPLGLVEEGAKTAPGKKRPVEQSPQEPDSSSGIGKTGQQPAKKRLNFGQTGDSESVPDPQPLGEPPATPAAVGPTTMASGGGAPMADNNEGADGVGNASGNWHCDSTWLGDRVITTSTRTWALPTYNNHLYKQISSASTGASNDNHYFGYSTPWGYFDFNRFHCHFSPRDWQRLINNNWGFRPKRLNFKLFNIQVKEVTTNDGVTTIANNLTSTVQVFSDSEYQLPYVLGSAHQGCLPPFPADVFMIPQYGYLTLNNGSQAVGRSSFYCLEYFPSQMLRTGNNFTFSYTFEDVPFHSSYAHSQSLDRLMNPLIDQYLYYLNRTQNQSGSAQNKDLLFSRGSPAGMSVQPKNWLPGPCYRQQRVSKTKTDNNNSNFTWTGASKYNLNGRESIINPGTAMASHKDDEDKFFPMSGVMIFGKESAGASNTALDNVMITDEEEIKATNPVATERFGTVAVNLQSSSTDPATGDVHVMGALPGMVWQDRDVYLQGPIWAKIPHTDGHFHPSPLMGGFGLKHPPPQILIKNTPVPANPPAEFSATKFASFITQYSTGQVSVEIEWELQKENSKRWNPEVQYTSNYAKSANVDFTVDNNGLYTEPRPIGTRYLTRPL

SEQ ID NO: 103 - protein, 736 aa, Adeno-associated virus
MAADGYLPDWLEDNLSEGIREWWDLKPGAPKPKANQQKQDDGRGLVLPGYKYLGPFNGLDKGEPVNAADAAALEHDKAYDQQLKAGDNPYLRYNHADAEFQERLQEDTSFGGNLGRAVFQAKKRVLEPLGLVEEGAKTAPGKKRPVEQSPQEPDSSSGIGKTGQQPAKKRLNFGQTGDSESVPDPQPLGEPPATPAAVGPTTMASGGGAPMADNNEGADGVGNASGNWHCDSTWLGDRVITTSTRTWALPTYNNHLYKQISSASTGASNDNHYFGYSTPWGYFDFNRFHCHFSPRDWQRLINNNWGFRPKRLNFKLFNIQVKEVTTNDGVTTIANNLTSTVQVFSDSEYQLPYVLGSAHQGCLPPFPADVFMIPQYGYLTLNNGSQAVGRSSFYCLEYFPSQMLRTGNNFTFSYTFEDVPFHSSYAHSQSLDRLMNPLIDQYLYYLNRTQNQSGSAQNKDLLFSRGSPAGMSVQPKNWLPGPCYRQQRVSKTKTDNNNSNFTWTGASKYNLNGRESIINPGTAMASHKDDKDKFFPMSGVMIFGKESAGASNTALDNVMITDEEEIKATNPVATERFGTVAVNLQSSSTDPATGDVHVMGALPGMVWQDRDVYLQGPIWAKIPHTDGHFHPSPLMGGFGLKHPPPQILIKNTPVPANPPAEFSATKFASFITQYSTGQVSVEIEWELQKENSKRWNPEVQYTSNYAKSANVDFTVDNNGLYTEPRPIGTRYLTRPL

SEQ ID NO: 104 - DNA, 2214 bp, Adeno-associated virus 7
atggctgccgatggttatcttccagattggctcgaggacaacctctctgagggcattcgcgagtggtgggacctgaaacctggagccccgaaacccaaagccaaccagcaaaagcaggacaacggccggggtctggtgcttcctggctacaagtacctcggacccttcaacggactcgacaagggggagcccgtcaacgcggcggacgcagcggccctcgagcacgacaaggcctacgaccagcagctcaaagcgggtgacaatccgtacctgcggtataaccacgccgacgccgagtttcaggagcgtctgcaagaagatacgtcatttgggggcaacctcgggcgagcagtcttccaggccaagaagcgggttctcgaacctctcggtctggttgaggaaggcgctaagacggctcctgcaaagaagagaccggtagagccgtcacctcagcgttcccccgactcctccacgggcatcggcaagaaaggccagcagcccgccagaaagagactcaatttcggtcagactggcgactcagagtcagtccccgaccctcaacctctcggagaacctccagcagcgccctctagtgtgggatctggtacagtggctgcaggcggtggcgcaccaatggcagacaataacgaaggtgccgacggagtgggtaatgcctcaggaaattggcattgcgattccacatggctgggcgacagagtcattaccaccagcacccgaacctgggccctgcccacctacaacaaccacctctacaagcaaatctccagtgaaactgcaggtagtaccaacgacaacacctacttcggctacagcaccccctgggggtattttgactttaacagattccactgccacttctcaccacgtgactggcagcgactcatcaacaacaactggggattccggcccaagaagctgcggttcaagctcttcaacatccaggtcaaggaggtcacgacgaatgacggcgttacgaccatcgctaataaccttaccagcacgattcaggtattctcggactcggaataccagctgccgtacgtcctcggctctgcgcaccagggctgcctgcctccgttcccggcggacgtcttcatgattcctcagtacggctacctgactctcaacaatggcagtcagtctgtgggacgttcctccttctactgcctggagtacttcccctctcagatgctgagaacgggcaacaactttgagttcagctacagcttcgaggacgtgcctttccacagcagctacgcacacagccagagcctggaccggctgatgaatcccctcatcgaccagtacttgtactacctggccagaacacagagtaacccaggaggcacagctggcaatcgggaactgcagttttaccagggcgggccttcaactatggccgaacaagccaagaattggttacctggaccttgcttccggcaacaaagagtctccaaaacgctggatcaaaacaacaacagcaactttgcttggactggtgccaccaaatatcacctgaacggcagaaactcgttggttaatcccggcgtcgccatggcaactcacaaggacgacgaggaccgctttttcccatccagcggagtcctgatttttggaaaaactggagcaactaacaaaactacattggaaaatgtgttaatgacaaatgaagaagaaattcgtcctactaatcctgtagccacggaagaatacgggatagtcagcagcaacttacaagcggctaatactgcagcccagacacaagttgtcaacaaccagggagccttacctggcatggtctggcagaaccgggacgtgtacctgcagggtcccatctgggccaagattcctcacacggatggcaactttcacccgtctcctttgatgggcggctttggacttaaacatccgcctcctcagatcctgatcaagaacactcccgttcccgctaatcctccggaggtgtttactcctgccaagtttgcttcgttcatcacacagtacagcaccggacaagtcagcgtggaaatcgagtgggagctgcagaaggaaaacagcaagcgctggaacccggagattcagtacacctccaactttgaaaagcagactggtgtggactttgccgttgacagccagggtgtttactctgagcctcgccctattggcactcgttacctcacccgtaatctgtaa

SEQ ID NO: 105 - protein, 738 aa, Adeno-associated virus 7
MAADGYLPDWLEDNLSEGIREWWALKPGAPKPKANQQKQDDGRGLVLPGYKYLGPFNGLDKGEPVNAADAAALEHDKAYDQQLQAGDNPYLRYNHADAEFQERLQEDTSFGGNLGRAVFQAKKRVLEPLGLVEEGAKTAPGKKRPVEPSPQRSPDSSTGIGKKGQQPARKRLNFGQTGDSESVPDPQPLGEPPAAPSGVGPNTMAAGGGAPMADNNEGADGVGSSSGNWHCDSTWLGDRVITTSTRTWALPTYNNHLYKQISNGTSGGATNDNTYFGYSTPWGYFDFNRFHCHFSPRDWQRLINNNWGFRPKRLSFKLFNIQVKEVTQNEGTKTIANNLTSTIQVFTDSEYQLPYVLGSAHQGCLPPFPADVFMIPQYGYLTLNNGSQAVGRSSFYCLEYFPSQMLRTGNNFQFTYTFEDVPFHSSYAHSQSLDRLMNPLIDQYLYYLSRTQTTGGTANTQTLGFSQGGPNTMANQAKNWLPGPCYRQQRVSTTTGQNNNSNFAWTAGTKYHLNGRNSLANPGIAMATHKDDEERFFPSNGILIFGKQNAARDNADYSDVMLTSEEEIKTTNPVATEEYGIVADNLQQQNTAPQIGTVNSQGALPGMVWQNRDVYLQGPIWAKIPHTDGNFHPSPLMGGFGLKHPPPQILIKNTPVPADPPTTFNQSKLNSFITQYSTGQVSVEIEWELQKENSKRWNPEIQYTSNYYKSTSVDFAVNTEGVYSEPRPIGTRYLTRNL

SEQ ID NO: 106 - protein, 737 aa, Adeno-associated virus 7
MAADGYLPDWLEDNLSEGIREWWDLKPGAPKPKANQQKQDNGRGLVLPGYKYLGPFNGLDKGEPVNAADAAALEHDKAYDQQLKAGDNPYLRYNHADAEFQERLQEDTSFGGNLGRAVFQAKKRVLEPLGLVEEGAKTAPAKKRPVEPSPQRSPDSSTGIGKKGQQPARKRLNFGQTGDSESVPDPQPLGEPPAAPSSVGSGTVAAGGGAPMADNNEGADGVGNASGNWHCDSTWLGDRVITTSTRTWALPTYNNHLYKQISSETAGSTNDNTYFGYSTPWGYFDFNRFHCHFSPRDWQRLINNNWGFRPKKLRFKLFNIQVKEVTTNDGVTTIANNLTSTIQVFSDSEYQLPYVLGSAHQGCLPPFPADVFMIPQYGYLTLNNGSQSVGRSSFYCLEYFPSQMLRTGNNFEFSYSFEDVPFHSSYAHSQSLDRLMNPLIDQYLYYLARTQSNPGGTAGNRELQFYQGGPSTMAEQAKNWLPGPCFRQQRVSKTLDQNNNSNFAWTGATKYHLNGRNSLVNPGVAMATHKDDEDRFFPSSGVLIFGKTGATNKTTLENVLMTNEEEIRPTNPVATEEYGIVSSNLQAANTAAQTQVVNNQGALPGMVWQNRDVYLQGPIWAKIPHTDGNFHPSPLMGGFGLKHPPPQILIKNTPVPANPPEVFTPAKFASFITQYSTGQVSVEIEWELQKENSKRWNPEIQYTSNFEKQTGVDFAVDSQGVYSEPRPIGTRYLTRNL

SEQ ID NO: 107 - protein, 623 aa, Adeno-associated virus 7
MPGFYEIVIKVPSDLDEHLPGISDSFVNWVAEKEWELPPDSDMDLNLIEQAPLTVAEKLQRDFLVQWRRVSKAPEALFFVQFEKGESYFHLHVLVETTGVKSMVLGRFLSQIREKLVQTIYRGVEPTLPNWFAVTKTRNGAGGGNKVVDECYIPNYLLPKTQPELQWAWTNMEEYISACLNLAERKRLVAQHLTHVSQTQEQNKENLNPNSDAPVIRSKTSARYMELVGWLVDRGITSEKQWIQEDQASYISFNAASNSRSQIKAALDNAGKIMALTKSAPDYLVGPSLPADIKTNRIYRILELNGYDPAYAGSVFLGWAQKKFGKRNTIWLFGPATTGKTNIAEAIAHAVPFYGCVNWTNENFPFNDCVDKMVIWWEEGKMTAKVVESAKAILGGSKVRVDQKCKSSAQIDPTPVIVTSNTNMCAVIDGNSTTFEHQQPLQDRMFKFELTRRLEHDFGKVTKQEVKEFFRWASDHVTEVAHEFYVRKGGASKRPAPDDADISEPKRACPSVADPSTSDAEGAPVDFADRYQNKCSRHAGMIQMLFPCKTCERMNQNFNICFTHGVRDCLECFPGVSESQPVVRKKTYRKLCAIHHLLGRAPEIACSACDLVNVDLDDCVSEQ

SEQ ID NO: 108 - DNA, 4721 bp, Adeno-associated virus 7
ttggccactccctctatgcgcgctcgctcgctcggtggggcctgcggaccaaaggtccgcagacggcagagctctgctctgccggccccaccgagcgagcgagcgcgcatagagggagtggccaactccatcactaggggtaccgcgaagcgcctcccacgctgccgcgtcagcgctgacgtaaatcacgtcataggggagtggtcctgtattagctgtcacgtgagtgcttttgcgacattttgcgacaccacgtggccatttgaggtatatatggccgagtgagcgagcaggatctccattttgaccgcgaaatttgaacgagcagcagccatgccgggtttctacgagatcgtgatcaaggtgccgagcgacctggacgagcacctgccgggcatttctgactcgtttgtgaactgggtggccgagaaggaatgggagctgcccccggattctgacatggatctgaatctgatcgagcaggcacccctgaccgtggccgagaagctgcagcgcgacttcctggtccaatggcgccgcgtgagtaaggccccggaggccctgttctttgttcagttcgagaagggcgagagctacttccaccttcacgttctggtggagaccacgggggtcaagtccatggtgctaggccgcttcctgagtcagattcgggagaagctggtccagaccatctaccgcggggtcgagcccacgctgcccaactggttcgcggtgaccaagacgcgtaatggcgccggcggggggaacaaggtggtggacgagtgctacatccccaactacctcctgcccaagacccagcccgagctgcagtgggcgtggactaacatggaggagtatataagcgcgtgtttgaacctggccgaacgcaaacggctcgtggcgcagcacctgacccacgtcagccagacgcaggagcagaacaaggagaatctgaaccccaattctgacgcgcccgtgatcaggtcaaaaacctccgcgcgctacatggagctggtcgggtggctggtggaccggggcatcacctccgagaagcagtggatccaggaggaccaggcctcgtacatctccttcaacgccgcctccaactcgcggtcccagatcaaggccgcgctggacaatgccggcaagatcatggcgctgaccaaatccgcgcccgactacctggtggggccctcgctgcccgcggacattaaaaccaaccgcatctaccgcatcctggagctgaacgggtacgatcctgcctacgccggctccgtctttctcggctgggcccagaaaaagttcgggaagcgcaacaccatctggctgtttgggcccgccaccaccggcaagaccaacattgcggaagccatcgcccacgccgtgcccttctacggctgcgtcaactggaccaatgagaactttcccttcaacgattgcgtcgacaagatggtgatctggtgggaggagggcaagatgacggccaaggtcgtggagtccgccaaggccattctcggcggcagcaaggtgcgcgtggaccaaaagtgcaagtcgtccgcccagatcgaccccacccccgtgatcgtcacctccaacaccaacatgtgcgccgtgattgacgggaacagcaccaccttcgagcaccagcagccgttgcaggaccggatgttcaaatttgaactcacccgccgtctggagcacgactttggcaaggtgacgaagcaggaagtcaaagagttcttccgctgggccagtgatcacgtgaccgaggtggcgcatgagttctacgtcagaaagggcggagccagcaaaagacccgcccccgatgacgcggatataagcgagcccaagcgggcctgcccctcagtcgcggatccatcgacgtcagacgcggaaggagctccggtggactttgccgacaggtaccaaaacaaatgttctcgtcacgcgggcatgattcagatgctgtttccctgcaaaacgtgcgagagaatgaatcagaatttcaacatttgcttcacacacggggtcagagactgtttagagtgtttccccggcgtgtcagaatctcaaccggtcgtcagaaaaaagacgtatcggaaactctgcgcgattcatcatctgctggggcgggcgcccgagattgcttgctcggcctgcgacctggtcaacgtggacctggacgactgcgtttctgagcaataaatgacttaaaccaggtatggctgccgatggttatcttccagattggctcgaggacaacctctctgagggcattcgcgagtggtgggacctgaaacctggagccccgaaacccaaagccaaccagcaaaagcaggacaacggccggggtctggtgcttcctggctacaagtacctcggacccttcaacggactcgacaagggggagcccgtcaacgcggcggacgcagcggccctcgagcacgacaaggcctacgaccagcagctcaaagcgggtgacaatccgtacctgcggtataaccacgccgacgccgagtttcaggagcgtctgcaagaagatacgtcatttgggggcaacctcgggcgagcagtcttccaggccaagaagcgggttctcgaacctctcggtctggttgaggaaggcgctaagacggctcctgcaaagaagagaccggtagagccgtcacctcagcgttcccccgactcctccacgggcatcggcaagaaaggccagcagcccgccagaaagagactcaatttcggtcagactggcgactcagagtcagtccccgaccctcaacctctcggagaacctccagcagcgccctctagtgtgggatctggtacagtggctgcaggcggtggcgcaccaatggcagacaataacgaaggtgccgacggagtgggtaatgcctcaggaaattggcattgcgattccacatggctgggcgacagagtcattaccaccagcacccgaacctgggccctgcccacctacaacaaccacctctacaagcaaatctccagtgaaactgcaggtagtaccaacgacaacacctacttcggctacagcaccccctgggggtattttgactttaacagattccactgccacttctcaccacgtgactggcagcgactcatcaacaacaactggggattccggcccaagaagctgcggttcaagctcttcaacatccaggtcaaggaggtcacgacgaatgacggcgttacgaccatcgctaataaccttaccagcacgattcaggtattctcggactcggaataccagctgccgtacgtcctcggctctgcgcaccagggctgcctgcctccgttcccggcggacgtcttcatgattcctcagtacggctacctgactctcaacaatggcagtcagtctgtgggacgttcctccttctactgcctggagtacttcccctctcagatgctgagaacgggcaacaactttgagttcagctacagcttcgaggacgtgcctttccacagcagctacgcacacagccagagcctggaccggctgatgaatcccctcatcgaccagtacttgtactacctggccagaacacagagtaacccaggaggcacagctggcaatcgggaactgcagttttaccagggcgggccttcaactatggccgaacaagccaagaattggttacctggaccttgcttccggcaacaaagagtctccaaaacgctggatcaaaacaacaacagcaactttgcttggactggtgccaccaaatatcacctgaacggcagaaactcgttggttaatcccggcgtcgccatggcaactcacaaggacgacgaggaccgctttttcccatccagcggagtcctgatttttggaaaaactggagcaactaacaaaactacattggaaaatgtgttaatgacaaatgaagaagaaattcgtcctactaatcctgtagccacggaagaatacgggatagtcagcagcaacttacaagcggctaatactgcagcccagacacaagttgtcaacaaccagggagccttacctggcatggtctggcagaaccgggacgtgtacctgcagggtcccatctgggccaagattcctcacacggatggcaactttcacccgtctcctttgatgggcggctttggacttaaacatccgcctcctcagatcctgatcaagaacactcccgttcccgctaatcctccggaggtgtttactcctgccaagtttgcttcgttcatcacacagtacagcaccggacaagtcagcgtggaaatcgagtgggagctgcagaaggaaaacagcaagcgctggaacccggagattcagtacacctccaactttgaaaagcagactggtgtggactttgccgttgacagccagggtgtttactctgagcctcgccctattggcactcgttacctcacccgtaatctgtaattgcatgttaatcaataaaccggttgattcgtttcagttgaactttggtctcctgtgcttcttatcttatcggtttccatagcaactggttacacattaactgcttgggtgcgcttcacgataagaacactgacgtcaccgcggtacccctagtgatggagttggccactccctctatgcgcgctcgctcgctcggtggggcctgcggaccaaaggtccgcagacggcagagctctgctctgccggccccaccgagcgagcgagcgcgcatagagggagtggccaa

SEQ ID NO: 109 - DNA, 2214 bp, Adeno-associated virus 7; identical to SEQ ID NO: 104

SEQ ID NO: 110 - protein, 737 aa, Adeno-associated virus 7; identical to SEQ ID NO: 106

SEQ ID NO: 111 - DNA, 2217 bp, Adeno-associated virus 8
atggctgccgatggttatcttccagattggctcgaggacaacctctctgagggcattcgcgagtggtgggcgctgaaacctggagccccgaagcccaaagccaaccagcaaaagcaggacgacggccggggtctggtgcttcctggctacaagtacctcggacccttcaacggactcgacaagggggagcccgtcaacgcggcggacgcagcggccctcgagcacgacaaggcctacgaccagcagctgcaggcgggtgacaatccgtacctgcggtataaccacgccgacgccgagtttcaggagcgtctgcaagaagatacgtcttttgggggcaacctcgggcgagcagtcttccaggccaagaagcgggttctcgaacctctcggtctggttgaggaaggcgctaagacggctcctggaaagaagagaccggtagagccatcaccccagcgttctccagactcctctacgggcatcggcaagaaaggccaacagcccgccagaaaaagactcaattttggtcagactggcgactcagagtcagttccagaccctcaacctctcggagaacctccagcagcgccctctggtgtgggacctaatacaatggctgcaggcggtggcgcaccaatggcagacaataacgaaggcgccgacggagtgggtagttcctcgggaaattggcattgcgattccacatggctgggcgacagagtcatcaccaccagcacccgaacctgggccctgcccacctacaacaaccacctctacaagcaaatctccaacgggacatcgggaggagccaccaacgacaacacctacttcggctacagcaccccctgggggtattttgactttaacagattccactgccacttttcaccacgtgactggcagcgactcatcaacaacaactggggattccggcccaagagactcagcttcaagctcttcaacatccaggtcaaggaggtcacgcagaatgaaggcaccaagaccatcgccaataacctcaccagcaccatccaggtgtttacggactcggagtaccagctgccgtacgttctcggctctgcccaccagggctgcctgcctccgttcccggcggacgtgttcatgattccccagtacggctacctaacactcaacaacggtagtcaggccgtgggacgctcctccttctactgcctggaatactttccttcgcagatgctgagaaccggcaacaacttccagtttacttacaccttcgaggacgtgcctttccacagcagctacgcccacagccagagcttggaccggctgatgaatcctctgattgaccagtacctgtactacttgtctcggactcaaacaacaggaggcacggcaaatacgcagactctgggcttcagccaaggtgggcctaatacaatggccaatcaggcaaagaactggctgccaggaccctgttaccgccaacaacgcgtctcaacgacaaccgggcaaaacaacaatagcaactttgcctggactgctgggaccaaataccatctgaatggaagaaattcattggctaatcctggcatcgctatggcaacacacaaagacgacgaggagcgtttttttcccagtaacgggatcctgatttttggcaaacaaaatgctgccagagacaatgcggattacagcgatgtcatgctcaccagcgaggaagaaatcaaaaccactaaccctgtggctacagaggaatacggtatcgtggcagataacttgcagcagcaaaacacggctcctcaaattggaactgtcaacagccagggggccttacccggtatggtctggcagaaccgggacgtgtacctgcagggtcccatctgggccaagattcctcacacggacggcaacttccacccgtctccgctgatgggcggctttggcctgaaacatcctccgcctcagatcctgatcaagaacacgcctgtacctgcggatcctccgaccaccttcaaccagtcaaagctgaactctttcatcacgcaatacagcaccggacaggtcagcgtggaaattgaatgggagctgcagaaggaaaacagcaagcgctggaaccccgagatccagtacacctccaactactacaaatctacaagtgtggactttgctgttaatacagaaggcgtgtactctgaaccccgccccattggcacccgttacctcacccgtaatctgtaa

SEQ ID NO: 112 - DNA, 2213 bp, Adeno-associated virus 8
atggctgccgatggttatcttccagattggctcgaggacaacctctctgagggcattcgcgagtggtgggcgctgaaacctggagccccgaagcccaaagccaaccagcaaaagcaggacgacggccggggtctggtgcttcctggctacaagtacctcggacccttcaacggactcgacaagggggagcccgtcaacgcggcggacgcagcggccctcgagcacgacaaggcctacgaccagcagctgcaggcgggtgacaatccgtacctgcggtataaccacgccgacgccgagtttcaggagcgtctgcaagaagatacgtcttttgggggcaacctcgggcgagcagtcttccaggccaagaagcgggttctcgaacctctcggtctggttgaggaaggcgctaagacggctcctggaaagaagagaccggtagagccatcaccccagcgttctccagactcctctacgggcatcggcaagaaaggccaacagcccgccagaaaaagactcaattttggtcagactggcgactcagagtcagttccagaccctcaacctctcggagaacctccagcagcgccctctggtgtgggacctaatacaatggctgcaggcggtggcgcaccaatggcagacaataacgaaggcgccgacggagtgggtagttcctcgggaaattggcattgcgattccacatggctgggcgacagagtcatcaccaccagcacccgaacctgggccctgcccacctacaacaaccacctctacaagcaaatctccaacgggacatcgggaggagccaccaacgacaacacctacttcggctacagcaccccctgggggtattttgactttaacagattccactgccacttttcaccacgtgactggcagcgactcatcaacaacaactggggattccggcccaagagactcagcttcaagctcttcaacatccaggtcaaggaggtcacgcagaatgaaggcaccaagaccatcgccaataacctcaccagcaccatccaggtgtttacggactcggagtaccagctgccgtacgttctcggctctgcccaccagggctgcctgcctccgttcccggcggacgtgttcatgattccccagtacggctacctaacactcaacaacggtagtcaggccgtgggacgctcctccttctactgcctggaatactttccttcgcagatgctgagaaccggcaacaacttccagtttacttacaccttcgaggacgtgcctttccacagcagctacgcccacagccagagcttggaccggctgatgaatcctctgattgaccagtacctgtactacttgtctcggactcaaacaacaggaggcacggcaaatacgcagactctgggcttcagccaaggtgggcctaatacaatggccaatcaggcaaagaactggctgccaggaccctgttaccgccaacaacgcgtctcaacgacaaccgggcaaaacaacaatagcaactttgcctggactgctgggaccaaataccatctgaatggaagaaattcattggctaatcctggcatcgctatggcaacacacaaagacgacgaggagcgtttttttcccagtaacgggatcctgatttttggcaaacaaaatgctgccagagacaatgcggattacagcgatgtcatgctcaccagcgaggaagaaatcaaaaccactaaccctgtggctacagaggaatacggtatcgtggcagataacttgcagcagcaaaacacggctcctcaaattggaactgtcaacagccagggggccttacccggtatggtctggcagaaccgggacgtgtacctgcagggtcccatctgggccaagattcctcacacggacggcaacttccacccgtctccgctgatgggcggctttggcctgaaacatcctccgcctcagatcctgatcaagaacacgcctgtacctgcggatcctccgaccaccttcaaccagtcaaagctgaactctttcatcacgcaatacagcaccggacaggtcagcgtggaaattgaatgggagctgcagaaggaaaacagcaagcgctggaaccccgagatccagtacacctccaactactacaaatctacaagtgtggactttgctgtaatacagaaggcgtgtactctgaaccccgccccattggcacccgttacctcacccgtaatctg

SEQ ID NO: 113 - DNA, 4393 bp, Adeno-associated virus 8
cagagagggagtggccaactccatcactaggggtagcgcgaagcgcctcccacgctgccgcgtcagcgctgacgtaaattacgtcataggggagtggtcctgtattagctgtcacgtgagtgcttttgcggcattttgcgacaccacgtggccatttgaggtatatatggccgagtgagcgagcaggatctccattttgaccgcgaaatttgaacgagcagcagccatgccgggcttctacgagatcgtgatcaaggtgccgagcgacctggacgagcacctgccgggcatttctgactcgtttgtgaactgggtggccgagaaggaatgggagctgcccccggattctgacatggatcggaatctgatcgagcaggcacccctgaccgtggccgagaagctgcagcgcgacttcctggtccaatggcgccgcgtgagtaaggccccggaggccctcttctttgttcagttcgagaagggcgagagctactttcacctgcacgttctggtcgagaccacgggggtcaagtccatggtgctaggccgcttcctgagtcagattcgggaaaagcttggtccagaccatctacccgcggggtcgagccccaccttgcccaactggttcgcggtgaccaaagacgcggtaatggcgccggcgggggggaacaaggtggtggacgagtgctacatccccaactacctcctgcccaagactcagcccgagctgcagtgggcgtggactaacatggaggagtatataagcgcgtgcttgaacctggccgagcgcaaacggctcgtggcgcagcacctgacccacgtcagccagacgcaggagcagaacaaggagaatctgaaccccaattctgacgcgcccgtgatcaggtcaaaaacctccgcgcgctatatggagctggtcgggtggctggtggaccggggcatcacctccgagaagcagtggatccaggaggaccaggcctcgtacatctccttcaacgccgcctccaactcgcggtcccagatcaaggccgcgctggacaatgccggcaagatcatggcgctgaccaaatccgcgcccgactacctggtggggccctcgctgcccgcggacattacccagaaccgcatctaccgcatcctcgctctcaacggctacgaccctgcctacgccggctccgtctttctcggctgggctcagaaaaagttcgggaaacgcaacaccatctggctgtttggacccgccaccaccggcaagaccaacattgcggaagccatcgcccacgccgtgcccttctacggctgcgtcaactggaccaatgagaactttcccttcaatgattgcgtcgacaagatggtgatctggtgggaggagggcaagatgacggccaaggtcgtggagtccgccaaggccattctcggcggcagcaaggtgcgcgtggaccaaaagtgcaagtcgtccgcccagatcgaccccacccccgtgatcgtcacctccaacaccaacatgtgcgccgtgattgacgggaacagcaccaccttcgagcaccagcagcctctccaggaccggatgtttaagttcgaactcacccgccgtctggagcacgactttggcaaggtgacaaagcaggaagtcaaagagttcttccgctgggccagtgatcacgtgaccgaggtggcgcatgagttttacgtcagaaagggcggagccagcaaaagacccgcccccgatgacgcggataaaagcgagcccaagcgggcctgcccctcagtcgcggatccatcgacgtcagacgcggaaggagctccggtggactttgccgacaggtaccaaaacaaatgttctcgtcacgcgggcatgcttcagatgctgtttccctgcaaaacgtgcgagagaatgaatcagaatttcaacatttgcttcacacacggggtcagagactgctcagagtgtttccccggcgtgtcagaatctcaaccggtcgtcagaaagaggacgtatcggaaactctgtgcgattcatcatctgctggggcgggctcccgagattgcttgctcggcctgcgatctggtcaacgtggacctggatgactgtgtttctgagcaataaatgacttaaaccaggtatggctgccgatggttatcttccagattggctcgaggacaacctctctgagggcattcgcgagtggtgggcgctgaaacctggagccccgaagcccaaagccaaccagcaaaagcaggacgacggccggggtctggtgcttcctggctacaagtacctcggacccttcaacggactcgacaagggggagcccgtcaacgcggcggacgcagcggccctcgagcacgacaaggcctacgaccagcagctgcaggcgggtgacaatccgtacctgcggtataaccacgccgacgccgagtttcaggagcgtctgcaagaagatacgtcttttgggggcaacctcgggcgagcagtcttccaggccaagaagcgggttctcgaacctctcggtctggttgaggaaggcgctaagacggctcctggaaagaagagaccggtagagccatcaccccagcgttctccagactcctctacgggcatcggcaagaaaggccaacagcccgccagaaaaagactcaattttggtcagactggcgactcagagtcagttccagaccctcaacctctcggagaacctccagcagcgccctctggtgtgggacctaatacaatggctgcaggcggtggcgcaccaatggcagacaataacgaaggcgccgacggagtgggtagttcctcgggaaattggcattgcgattccacatggctgggcgacagagtcatcaccaccagcacccgaacctgggccctgcccacctacaacaaccacctctacaagcaaatctccaacgggacatcgggaggagccaccaacgacaacacctacttcggctacagcaccccctgggggtattttgactttaacagattccactgccacttttcaccacgtgactggcagcgactcatcaacaacaactggggattccggcccaagagactcagcttcaagctcttcaacatccaggtcaaggaggtcacgcagaatgaaggcaccaagaccatcgccaataacctcaccagcaccatccaggtgtttacggactcggagtaccagctgccgtacgttctcggctctgcccaccagggctgcctgcctccgttcccggcggacgtgttcatgattccccagtacggctacctaacactcaacaacggtagtcaggccgtgggacgctcctccttctactgcctggaatactttccttcgcagatgctgagaaccggcaacaacttccagtttacttacaccttcgaggacgtgcctttccacagcagctacgcccacagccagagcttggaccggctgatgaatcctctgattgaccagtacctgtactacttgtctcggactcaaacaacaggaggcacggcaaatacgcagactctgggcttcagccaaggtgggcctaatacaatggccaatcaggcaaagaactggctgccaggaccctgttaccgccaacaacgcgtctcaacgacaaccgggcaaaacaacaatagcaactttgcctggactgctgggaccaaataccatctgaatggaagaaattcattggctaatcctggcatcgctatggcaacacacaaagacgacgaggagcgtttttttcccagtaacgggatcctgatttttggcaaacaaaatgctgccagagacaatgcggattacagcgatgtcatgctcaccagcgaggaagaaatcaaaaccactaaccctgtggctacagaggaatacggtatcgtggcagataacttgcagcagcaaaacacggctcctcaaattggaactgtcaacagccagggggccttacccggtatggtctggcagaaccgggacgtgtacctgcagggtcccatctgggccaagattcctcacacggacggcaacttccacccgtctccgctgatgggcggctttggcctgaaacatcctccgcctcagatcctgatcaagaacacgcctgtacctgcggatcctccgaccaccttcaaccagtcaaagctgaactctttcatcacgcaatacagcaccggacaggtcagcgtggaaattgaatgggagctgcagaaggaaaacagcaagcgctggaaccccgagatccagtacacctccaactactacaaatctacaagtgtggactttgctgttaatacagaaggcgtgtactctgaaccccgccccattggcacccgttacctcacccgtaatctgtaattgcctgttaatcaataaaccggttgattcgtttcagttgaactttggtctctgcg

SEQ ID NO: 114 - protein, 738 aa, Adeno-associated virus 8; identical to SEQ ID NO: 105

SEQ ID NO: 115 - protein, 737 aa, Adeno-associated virus 8
MAADGYLPDWLEDNLSEGIREWWALKPGAPKPKANQQKQDDGRGLVLPGYKYLGPFNGLDKGEPVNAADAAALEHDKAYDQQLQAGDNPYLRYNHADAEFQERLQEDTSFGGNLGRAVFQAKKRVLEPLGLVEEGAKTAPGKKRPVEPSPQRSPDSSTGIGKKGQQPARKRLNFGQTGDSESVPDPQPLGEPPAAPSGVGPNTMAAGGGAPMADNNEGADGVGSSSGNWHCDSTWLGDRVITTSTRTWALPTYNNHLYKQISNGTSGGATNDNTYFGYSTPWGYFDFNRFHCHFSPRDWQRLINNNWGFRPKRLSFKLFNIQVKEVTQNEGTKTIANNLTSTIQVFTDSEYQLPYVLGSAHQGCLPPFPADVFMIPQYGYLTLNNGSQAVGRSSFYCLEYFPSQMLRTGNNFQFTYTFEDVPFHSSYAHSQSLDRLMNPLIDQYLYYLSRTQTTGGTANTQTLGFSQGGPNTMANQAKNWLPGPCYRQQRVSTTTGQNNNSNFAWTAGTKYHLNGRNSLANPGIAMATHKDDEERFFPSNGILIFGKQNAARDNADYSDVMLTSEEEIKTTNPVATEEYGIVADNLQQQNTAPQIGTVNSQGALPGMVWQNRDVYLQGPIWAKIPHTDGNFHPSPLMGGFGLKHPPPQILIKNTPVPADPPTTFNQSKLNSFITQYSTGQVSVEIEWELQKENSKRWNPEIQYTSNYYKSTSVDFAVIQKACTLNPAPLAPVTSPVI

SEQ ID NO: 116 - DNA, 2217 bp, Adeno-associated virus 8; identical to SEQ ID NO: 111

SEQ ID NO: 117 - DNA, 2214 bp, Artificial Sequence
  Description of Artificial Sequence: Synthetic polynucleotide
atggctgccgatggttatcttccagattggctcgaggacaacctctctgagggcattcgcgagtggtgggcgctgaaacctggagccccgaagcccaaagccaaccagcaaaagcaggacgacggccggggtctggtgcttcctggctacaagtacctcggacccttcaacggactcgacaagggggagcccgtcaacgcggcggacgcagcggccctcgagcacgacaaggcctacgaccagcagctgcaggcgggtgacaatccgtacctgcggtataaccacgccgacgccgagtttcaggagcgtctgcaagaagatacgtcttttgggggcaacctcgggcgagcagtcttccaggccaagaagcgggttctcgaacctctcggtctggttgaggaaggcgctaagacggctcctggaaagaagagaccggtagagccatcaccccagcgttctccagactcctctacgggcatcggcaagaaaggccaacagcccgccagaaaaagactcaattttggtcagactggcgactcagagtcagttccagaccctcaacctctcggagaacctccagcagcgccctctggtgtgggacctaatacaatggctgcaggcggtggcgcaccaatggcagacaataacgaaggcgccgacggagtgggtagttcctcgggaaattggcattgcgattccacatggctgggcgacagagtcatcaccaccagcacccgaacctgggccctgcccacctacaacaaccacctctacaagcaaatctccaacgggacatcgggaggagccaccaacgacaacacctacttcggctacagcaccccctgggggtattttgactttaacagattccactgccacttttcaccacgtgactggcagcgactcatcaacaacaactggggattccggcccaagagactcagcttcaagctcttcaacatccaggtcaaggaggtcacgcagaatgaaggcaccaagaccatcgccaataacctcaccagcaccatccaggtgtttacggactcggagtaccagctgccgtacgttctcggctctgcccaccagggctgcctgcctccgttcccggcggacgtgttcatgattccccagtacggctacctaacactcaacaacggtagtcaggccgtgggacgctcctccttctactgcctggaatactttccttcgcagatgctgagaaccggcaacaacttccagtttacttacaccttcgaggacgtgcctttccacagcagctacgcccacagccagagcttggaccggctgatgaatcctctgattgaccagtacctgtactacttgtctcggactcaaacaacaggaggcacggcaaatacgcagactctgggcttcagccaaggtgggcctaatacaatggccaatcaggcaaagaactggctgccaggaccctgttaccgccaacaacgcgtctcaacgacaaccgggcaaaacaacaatagcaactttgcctggactgctgggaccaaataccatctgaatggaagaaattcattggctaatcctggcatcgctatggcaacacacaaagacgacgaggagcgtttttttcccagtaacgggatcctgatttttggcaaacaaaatgctgccagagacaatgcggattacagcgatgtcatgctcaccagcgaggaagaaatcaaaaccactaaccctgtggctacagaggaatacggtatcgtggcagataacttgcctgagcggacggcgatgagtcttccgggaactgtcaacagccagggggccttacccggtatggtctggcagaaccgggacgtgtacctgcagggtcccatctgggccaagattcctcacacggacggcaacttccacccgtctccgctgatgggcggctttggcctgaaacatcctccgcctcagatcctgatcaagaacacgcctgtacctgcggatcctccgaccaccttcaaccagtcaaagctgaactctttcatcacgcaatacagcaccggacaggtcagcgtggaaattgaatgggagctgcagaaggaaaacagcaagcgctggaaccccgagatccagtacacctccaactactacaaatctacaagtgtggactttgctgttaatacagaaggcgtgtactctgaaccccgccccattggcacccgttacctcacccgtaatctg

SEQ ID NO: 118 - protein, 738 aa, Artificial Sequence
  Description of Artificial Sequence: Synthetic polypeptide
MAADGYLPDWLEDNLSEGIREWWALKPGAPKPKANQQKQDDGRGLVLPGYKYLGPFNGLDKGEPVNAADAAALEHDKAYDQQLQAGDNPYLRYNHADAEFQERLQEDTSFGGNLGRAVFQAKKRVLEPLGLVEEGAKTAPGKKRPVEPSPQRSPDSSTGIGKKGQQPARKRLNFGQTGDSESVPDPQPLGEPPAAPSGVGPNTMAAGGGAPMADNNEGADGVGSSSGNWHCDSTWLGDRVITTSTRTWALPTYNNHLYKQISNGTSGGATNDNTYFGYSTPWGYFDFNRFHCHFSPRDWQRLINNNWGFRPKRLSFKLFNIQVKEVTQNEGTKTIANNLTSTIQVFTDSEYQLPYVLGSAHQGCLPPFPADVFMIPQYGYLTLNNGSQAVGRSSFYCLEYFPSQMLRTGNNFQFTYTFEDVPFHSSYAHSQSLDRLMNPLIDQYLYYLSRTQTTGGTANTQTLGFSQGGPNTMANQAKNWLPGPCYRQQRVSTTTGQNNNSNFAWTAGTKYHLNGRNSLANPGIAMATHKDDEERFFPSNGILIFGKQNAARDNADYSDVMLTSEEEIKTTNPVATEEYGIVADNLPERTAMSLPGTVNSQGALPGMVWQNRDVYLQGPIWAKIPHTDGNFHPSPLMGGFGLKHPPPQILIKNTPVPADPPTTFNQSKLNSFITQYSTGQVSVEIEWELQKENSKRWNPEIQYTSNYYKSTSVDFAVNTEGVYSEPRPIGTRYLTRNL

SEQ ID NO: 119 - DNA, 2214 bp, Artificial Sequence
  Description of Artificial Sequence: Synthetic polynucleotide
atggctgccgatggttatcttccagattggctcgaggacaacctctctgagggcattcgcgagtggtgggcgctgaaacctggagccccgaagcccaaagccaaccagcaaaagcaggacgacggccggggtctggtgcttcctggctacaagtacctcggacccttcaacggactcgacaagggggagcccgtcaacgcggcggacgcagcggccctcgagcacgacaaggcctacgaccagcagctgcaggcgggtgacaatccgtacctgcggtataaccacgccgacgccgagtttcaggagcgtctgcaagaagatacgtcttttgggggcaacctcgggcgagcagtcttccaggccaagaagcgggttctcgaacctctcggtctggttgaggaaggcgctaagacggctcctggaaagaagagaccggtagagccatcaccccagcgttctccagactcctctacgggcatcggcaagaaaggccaacagcccgccagaaaaagactcaattttggtcagactggcgactcagagtcagttccagaccctcaacctctcggagaacctccagcagcgccctctggtgtgggacctaatacaatggctgcaggcggtggcgcaccaatggcagacaataacgaaggcgccgacggagtgggtagttcctcgggaaattggcattgcgattccacatggctgggcgacagagtcatcaccaccagcacccgaacctgggccctgcccacctacaacaaccacctctacaagcaaatctccaacgggacatcgggaggagccaccaacgacaacacctacttcggctacagcaccccctgggggtattttgactttaacagattccactgccacttttcaccacgtgactggcagcgactcatcaacaacaactggggattccggcccaagagactcagcttcaagctcttcaacatccaggtcaaggaggtcacgcagaatgaaggcaccaagaccatcgccaataacctcaccagcaccatccaggtgtttacggactcggagtaccagctgccgtacgttctcggctctgcccaccagggctgcctgcctccgttcccggcggacgtgttcatgattccccagtacggctacctaacactcaacaacggtagtcaggccgtgggacgctcctccttctactgcctggaatactttccttcgcagatgctgagaaccggcaacaacttccagtttacttacaccttcgaggacgtgcctttccacagcagctacgcccacagccagagcttggaccggctgatgaatcctctgattgaccagtacctgtactacttgtctcggactcaaacaacaggaggcacggcaaatacgcagactctgggcttcagccaaggtgggcctaatacaatggccaatcaggcaaagaactggctgccaggaccctgttaccgccaacaacgcgtctcaacgacaaccgggcaaaacaacaatagcaactttgcctggactgctgggaccaaataccatctgaatggaagaaattcattggctaatcctggcatcgctatggcaacacacaaagacgacgaggagcgtttttttcccagtaacgggatcctgatttttggcaaacaaaatgctgccagagacaatgcggattacagcgatgtcatgctcaccagcgaggaagaaatcaaaaccactaaccctgtggctacagaggaatacggtatcgtggcagataacttgagttttagtcgtgcggttctttgtgatggaactgtcaacagccagggggccttacccggtatggtctggcagaaccgggacgtgtacctgcagggtcccatctgggccaagattcctcacacggacggcaacttccacccgtctccgctgatgggcggctttggcctgaaacatcctccgcctcagatcctgatcaagaacacgcctgtacctgcggatcctccgaccaccttcaaccagtcaaagctgaactctttcatcacgcaatacagcaccggacaggtcagcgtggaaattgaatgggagctgcagaaggaaaacagcaagcgctggaaccccgagatccagtacacctccaactactacaaatctacaagtgtggactttgctgttaatacagaaggcgtgtactctgaaccccgccccattggcacccgttacctcacccgtaatctg

SEQ ID NO: 120 - protein, 738 aa, Artificial Sequence
  Description of Artificial Sequence: Synthetic polypeptide
MAADGYLPDWLEDNLSEGIREWWALKPGAPKPKANQQKQDDGRGLVLPGYKYLGPFNGLDKGEPVNAADAAALEHDKAYDQQLQAGDNPYLRYNHADAEFQERLQEDTSFGGNLGRAVFQAKKRVLEPLGLVEEGAKTAPGKKRPVEPSPQRSPDSSTGIGKKGQQPARKRLNFGQTGDSESVPDPQPLGEPPAAPSGVGPNTMAAGGGAPMADNNEGADGVGSSSGNWHCDSTWLGDRVITTSTRTWALPTYNNHLYKQISNGTSGGATNDNTYFGYSTPWGYFDFNRFHCHFSPRDWQRLINNNWGFRPKRLSFKLFNIQVKEVTQNEGTKTIANNLTSTIQVFTDSEYQLPYVLGSAHQGCLPPFPADVFMIPQYGYLTLNNGSQAVGRSSFYCLEYFPSQMLRTGNNFQFTYTFEDVPFHSSYAHSQSLDRLMNPLIDQYLYYLSRTQTTGGTANTQTLGFSQGGPNTMANQAKNWLPGPCYRQQRVSTTTGQNNNSNFAWTAGTKYHLNGRNSLANPGIAMATHKDDEERFFPSNGILIFGKQNAARDNADYSDVMLTSEEEIKTTNPVATEEYGIVADNLSFSRAVLCDGTVNSQGALPGMVWQNRDVYLQGPIWAKIPHTDGNFHPSPLMGGFGLKHPPPQILIKNTPVPADPPTTFNQSKLNSFITQYSTGQVSVEIEWELQKENSKRWNPEIQYTSNYYKSTSVDFAVNTEGVYSEPRPIGTRYLTRNL

SEQ ID NO: 121 - DNA, 4385 bp, Adeno-associated virus 9
cagagagggagtggccaactccatcactaggggtaatcgcgaagcgcctcccacgctgccgcgtcagcgctgacgtagattacgtcataggggagtggtcctgtattagctgtcacgtgagtgcttttgcgacattttgcgacaccacatggccatttgaggtatatatggccgagtgagcgagcaggatctccattttgaccgcgaaatttgaacgagcagcagccatgccgggcttctacgagattgtgatcaaggtgccgagcgacctggacgagcacctgccgggcatttctgactcttttgtgaactgggtggccgagaaggaatgggagctgcccccggattctgacatggatcggaatctgatcgagcaggcacccctgaccgtggccgagaagctgcagcgcgacttcctggtccaatggcgccgcgtgagtaaggccccggaggccctcttctttgttcagttcgagaagggcgagagctactttcacctgcacgttctggtcgagaccacgggggtcaagtccatggtgctaggccgcttcctgagtcagattcgggagaagctggtccagaccatctaccgcgggatcgagccgaccctgcccaactggttcgcggtgaccaagacgcgtaatggcgccggcggggggaacaaggtggtggacgagtgctacatccccaactacctcctgcccaagactcagcccgagctgcagtgggcgtggactaacatggaggagtatataagcgcgtgcttgaacctggccgagcgcaaacggctcgtggcgcagcacctgacccacgtcagccagacgcaggagcagaacaaggagaatctgaaccccaattctgacgcgcccgtgatcaggtcaaaaacctccgcgcgctacatggagctggtcgggtggctggtggaccggggcatcacctccgagaagcagtggatccaggaggaccaggcctcgtacatctccttcaacgccgcctccaactcgcggtcccagatcaaggccgcgctggacaatgccggcaagatcatggcgctgaccaaatccgcgcccgactacctggtaggcccttcacttccggtggacattacgcagaaccgcatctaccgcatcctgcagctcaacggctacgaccctgcctacgccggctccgtctttctcggctgggcacaaaagaagttcgggaaacgcaacaccatctggctgtttgggccggccaccacgggaaagaccaacatcgcagaagccattgcccacgccgtgcccttctacggctgcgtcaactggaccaatgagaactttcccttcaacgattgcgtcgacaagatggtgatctggtgggaggagggcaagatgacggccaaggtcgtggagtccgccaaggccattctcggcggcagcaaggtgcgcgtggaccaaaagtgcaagtcgtccgcccagatcgaccccactcccgtgatcgtcacctccaacaccaacatgtgcgccgtgattgacgggaacagcaccaccttcgagcaccagcagcctctccaggaccggatgtttaagttcgaactcacccgccgtctggagcacgactttggcaaggtgacaaagcaggaagtcaaagagttcttccgctgggccagtgatcacgtgaccgaggtggcgcatgagttttacgtcagaaagggcggagccagcaaaagacccgcccccgatgacgcggataaaagcgagcccaagcgggcctgcccctcagtcgcggatccatcgacgtcagacgcggaaggagctccggtggactttgccgacaggtaccaaaacaaatgttctcgtcacgcgggcatgcttcagatgctgcttccctgcaaaacgtgcgagagaatgaatcagaatttcaacatttgcttcacacacggggtcagagactgctcagagtgtttccccggcgtgtcagaatctcaaccggtcgtcagaaagaggacgtatcggaaactctgtgcgattcatcatctgctggggcgggctcccgagattgcttgctcggcctgcgatctggtcaacgtggacctggatgactgtgtttctgagcaataaatgacttaaaccaggtatggctgccgatggttatcttccagattggctcgaggacaacctctctgagggcattcgcgagtggtgggcgctgaaacctggagccccgaagcccaaagccaaccagcaaaagcaggacgacggccggggtctggtgcttcctggctacaagtacctcggacccttcaacggactcgacaagggggagcccgtcaacgcggcggacgcagcggccctcgagcacggcaaggcctacgaccagcagctgcaggcgggtgacaatccgtacctgcggtataaccacgccgacgccgagtttcaggagcgtctgcaagaagatacgtcttttgggggcaacctcgggcgagcagtcttccaggccaagaagcgggttctcgaacctctcggtctggttgaggaaggcgctaagacggctcctggaaagaagagaccggtagagccatcaccccagcgttctccagactcctctacgggcatcggcaagaaaggccaacagcccgccagaaaaagactcaattttggtcagactggcgactcagagtcagttccagaccctcaacctctcggagaacctccagcagcgccctctggtgtgggacctaatacaatggctgcaggcggtggcgcaccaatggcagacaataacgaaggcgccgacggagtgggtaattcctcgggaaattggcattgcgattccacatggctgggggacagagtcatcaccaccagcacccgaacctgggcattgcccacctacaacaaccacctctacaagcaaatctccaatggaacatcgggaggaagcaccaacgacaacacctactttggctacagcaccccctgggggtattttgacttcaacagattccactgccacttctcaccacgtgactggcagcgactcatcaacaacaactggggattccggccaaagagactcaacttcaagctgttcaacatccaggtcaaggaggttacgacgaacgaaggcaccaagaccatcgccaataaccttaccagcaccgtccaggtctttacggactcggagtaccagctaccgtacgtcctaggctctgcccaccaaggatgcctgccaccgtttcctgcagacgtcttcatggttcctcagtacggctacctgacgctcaacaatggaagtcaagcgttaggacgttcttctttctactgtctggaatacttcccttctcagatgctgagaaccggcaacaactttcagttcagctacactttcgaggacgtgcctttccacagcagctacgcacacagccagagtctagatcgactgatgaaccccctcatcgaccagtacctatactacctggtcagaacacagacaactggaactgggggaactcaaactttggcattcagccaagcaggccctagctcaatggccaatcaggctagaaactgggtacccgggccttgctaccgtcagcagcgcgtctccacaaccaccaaccaaaataacaacagcaactttgcgtggacgggagctgctaaattcaagctgaacgggagagactcgctaatgaatcctggcgtggctatggcatcgcacaaagacgacgaggaccgcttctttccatcaagtggcgttctcatatttggcaagcaaggagccgggaacgatggagtcgactacagccaggtgctgattacagatgaggaagaaattaaagccaccaaccctgtagccacagaggaatacggagcagtggccatcaacaaccaggccgctaacacgcaggcgcaaactggacttgtgcataaccagggagttattcctggtatggtctggcagaaccgggacgtgtacctgcagggccctatttgggctaaaatacctcacacagatggcaactttcacccgtctcctctgatgggtggatttggactgaaacacccacctccacagattctaattaaaaatacaccagtgccggcagatcctcctcttaccttcaatcaagccaagctgaactctttcatcacgcagtacagcacgggacaagtcagcgtggaaatcgagtgggagctgcagaaagaaaacagcaagcgctggaatccagagatccagtatacttcaaactactacaaatctacaaatgtggactttgctgtcaataccaaaggtgtttactctgagcctcgccccattggtactcgttacctcacccgtaatttgtaattgcctgttaatcaataaaccggttaattcgtttcagttgaactttggtctctgcg

SEQ ID NO: 122 - DNA, 4382 bp, Adeno-associated virus 9
cagagagggagtggccaactccatcactaggggtaatcgcgaagcgcctcccacgctgccgcgtcagcgctgacgtagattacgtcataggggagtggtcctgtattagctgtcacgtgagtgcttttgcgacattttgcgacaccacatggccatttgaggtatatatggccgagtgagcgagcaggatctccattttgaccgcgaaatttgaacgagcagcagccatgccgggcttctacgagattgtgatcaaggtgccgagcgacctggacgagcacctgccgggcatttctgactcttttgtgaactgggtggccgagaaggaatgggagctgcccccggattctgacatggatcggaatctgatcgagcaggcacccctgaccgtggccgagaagctgtagcgcgacttcctggtccaatggcgccgcgtgagtaaggccccggaggccctcttctttgttcagttcgagaagggcgagagctactttcacctgcacgttctggtcgagaccacgggggtcaagtccatggtgctaggccgcttcctgagtcagattcgggagaagctggtccagaccatctaccgcgggatcgagccgaccctgcccaactggttcgcggtgaccaagacgcgtaatggcgccggcggggggaacaaggtggtggacgagtgctacatccccaactacctcctgcccaagactcagcccgagctgcagtgggcgtggactaacatggaggagtatataagcgcgtgcttgaacctggccgagcgcaaacggctcgtggcgcagcacctgacccacgtcagccagacgcaggagcagaacaaggagaatctgaaccccaattctgacgcgcccgtgatcaggtcaaaaacctccgcgcgctacatggagctggtcgggtggctggtggaccggggcatcacctccgagaagcagtggatccaggaggaccaggcctcgtacatctccttcaacgccgcctccaactcgcggtcccagatcaaggccgcgctggacaatgccggcaagatcatggcgctgaccaaatccgcgcccgactacctggtaggcccttcacttccggtggacattacgcagaaccgcatctaccgcatcctgcagctcaacggctacgaccctgcctacgccggctccgtctttctcggctgggcacaaaagaagttcgggaaacgcaacaccatctggctgtttgggccggccaccacgggaaagaccaacatcgcagaagccattgcccacgccgtgcccttctacggctgcgtcaactggaccaatgagaactttcccttcaacgattgcgtcgacaagatggtgatctggtgggaggagggcaagatgacggccaaggtcgtggagtccgccaaggccattctcggcggcagcaaggtgcgcgtggaccaaaagtgcaagtcgtccgcccagatcgaccccactcccgtgatcgtcacctccaacaccaacatgtgcgccgtgattgacgggaacagcaccaccttcgagcaccagcagcctctccaggaccggatgtttaagttcgaactcacccgccgtctggagcacgactttggcaaggtgacaaagcaggaagtcaaagagttcttccgctgggccagtgatcacgtgaccgaggtggcgcatgagttttacgtcagaaagggcggagccagcaaaagacccgcccccgatgacgcggataaaagcgagcccaagcgggcctgcccctcagtcgcggatccatcgacgtcagacgcggaaggagctccggtggactttgccgacaggtaccaaaacaaatgttctcgtcacgcgggcatgcttcagatgctgcttccctgcaaaacgtgcgagagaatgaatcagaatttcaacatttgcttcacacacggggtcagagactgctcagagtgtttccccggcgtgtcagaatctcaaccggtcgtcagaaagaggacgtatcggaaactctgtgcgattcatcatctgctggggcgggctcccgagattgcttgctcggcctgcgatctggtcaacgtggacctggatgactgtgtttctgagcaataaatgacttaaaccaggtatggctgccgatggttatcttccagattggctcgaggacaacctctctgagggcattcgcgagtggtgggacctgaaacctggagccccgaaacccaaagccaaccagcaaaagcaggacgacggccggggtctggtgcttcctggctacaagtacctcggacccttcaacggactcgacaagggggagcccgtcaacgcggcggacgcagcggccctcgagcacgacaaggcctacgaccagcagctcaaagcgggtgacaatccgtacctgcggtataaccacgccgacgccgagtttcaggagcgtctgcaagaagatacgtcttttgggggcaacctcgggcgagcagtcttccaggccaagaagcgggttctcgaacctctcggtctggttgaggaaggcgctaagacggctcctggaaagaagagaccggtagagcagtcaccccaagaaccagactcatcctcgggcatcggcaaatcaggccagcagcccgctaaaaagagactcaattttggtcagactggcgactcagagtcagtccccgacccacaacctctcggagaacctccagaagccccctcaggtctgggacctaatacaatggcttcaggcggtggcgctccaatggcagacaataacgaaggcgccgacggagtgggtaattcctcgggaaattggcattgcgattccacatggctgggggacagagtcatcaccaccagcacccgaacctgggcattgcccacctacaacaaccacctctacaagcaaatctccaatggaacatcgggaggaagcaccaacgacaacacctactttggctacagcaccccctgggggtattttgacttcaacagattccactgccacttctcaccacgtgactggcagcgactcatcaacaacaactggggattccggccaaagagactcaacttcaagctgttcaacatccaggtcaaggaggttacgacgaacgaaggcaccaagaccatcgccaataaccttaccagcaccgtccaggtctttacggactcggagtaccagctaccgtacgtcctaggctctgcccaccaaggatgcctgccaccgtttcctgcagacgtcttcatggttcctcagtacggctacctgacgctcaacaatggaagtcaagcgttaggacgttcttctttctactgtctggaatacttcccttctcagatgctgagaaccggcaacaactttcagttcagctacactttcgaggacgtgcctttccacagcagctacgcacacagccagagtctagatcgactgatgaaccccctcatcgaccagtacctatactacctggtcagaacacagacaactggaactgggggaactcaaactttggcattcagccaagcaggccctagctcaatggccaatcaggctagaaactgggtacccgggccttgctaccgtcagcagcgcgtctccacaaccaccaaccaaaataacaacagcaactttgcgtggacgggagctgctaaattcaagctgaacgggagagactcgctaatgaatcctggcgtggctatggcatcgcacaaagacgacgaggaccgcttctttccatcaagtggcgttctcatatttggcaagcaaggagccgggaacgatggagtcgactacagccaggtgctgattacagatgaggaagaaattaaagccaccaaccctgtagccacagaggaatacggagcagtggccatcaacaaccaggccgctaacacgcaggcgcaaactggacttgtgcataaccagggagttattcctggtatggtctggcagaaccgggacgtgtacctgcagggccctatttgggctaaaatacctcacacagatggcaactttcacccgtctcctctgatgggtggatttggactgaaacacccacctccacagattctaattaaaaatacaccagtgccggcagatcctcctcttaccttcaatcaagccaagctgaactctttcatcacgcagtacagcacgggacaagtcagcgtggaaatcgagtgggagctgcagaaagaaaacagcaagcgctggaatccagagatccagtatacttcaaactactacaaatctacaaatgtggactttgctgtcaataccgaaggtgtttactctgagcctcgccccattggtactcgttacctcacccgtaatttgtaattgcctgttaatcaataaaccggttaattcgtttcagttgaactttggtctctgcg

SEQ ID NO: 123 - protein, 736 aa, Adeno-associated virus 9
MAADGYLPDWLEDNLSEGIREWWALKPGAPQPKANQQHQDNARGLVLPGYKYLGPGNGLDKGEPVNAADAAALEHDKAYDQQLKAGDNPYLKYNHADAEFQERLKEDTSFGGNLGRAVFQAKKRLLEPLGLVEEAAKTAPGKKRPVEQSPQEPDSSAGIGKSGAQPAKKRLNFGQTGDTESVPDPQPIGEPPAAPSGVGSLTMASGGGAPVADNNEGADGVGSSSGNWHCDSQWLGDRVITTSTRTWALPTYNNHLYKQISNSTSGGSSNDNAYFGYSTPWGYFDFNRFHCHFSPRDWQRLINNNWGFRPKRLNFKLFNIQVKEVTDNNGVKTIANNLTSTVQVFTDSDYQLPYVLGSAHEGCLPPFPADVFMIPQYGYLTLNDGSQAVGRSSFYCLEYFPSQMLRTGNNFQFSYEFENVPFHSSYAHSQSLDRLMNPLIDQYLYYLSKTINGSGQNQQTLKFSVAGPSNMAVQGRNYIPGPSYRQQRVSTTVTQNNNSEFAWPGASSWALNGRNSLMNPGPAMASHKEGEDRFFPLSGSLIFGKQGTGRDNVDADKVMITNEEEIKTTNPVATESYGQVATNHQSAQAQAQTGWVQNQGILPGMVWQDRDVYLQGPIWAKIPHTDGNFHPSPLMGGFGMKHPPPQILIKNTPVPADPPTAFNKDKLNSFITQYSTGQVSVEIEWELQKENSKRWNPEIQYTSNYYKSNNVEFAVNTEGVYSEPRPIGTRYLTRNL

SEQ ID NO: 124 - protein, 736 aa, Adeno-associated virus 9
MAADGYLPDWLEDNLSEGIREWWDLKPGAPKPKANQQKQDDGRGLVLPGYKYLGPFNGLDKGEPVNAADAAALEHDKAYDQQLKAGDNPYLRYNHADAEFQERLQEDTSFGGNLGRAVFQAKKRVLEPLGLVEEGAKTAPGKKRPVEQSPQEPDSSSGIGKSGQQPAKKRLNFGQTGDSESVPDPQPLGEPPEAPSGLGPNTMASGGGAPMADNNEGADGVGNSSGNWHCDSTWLGDRVITTSTRTWALPTYNNHLYKQISNGTSGGSTNDNTYFGYSTPWGYFDFNRFHCHFSPRDWQRLINNNWGFRPKRLNFKLFNIQVKEVTTNEGTKTIANNLTSTVQVFTDSEYQLPYVLGSAHQGCLPPFPADVFMVPQYGYLTLNNGSQALGRSSFYCLEYFPSQMLRTGNNFQFSYTFEDVPFHSSYAHSQSLDRLMNPLIDQYLYYLVRTQTTGTGGTQTLAFSQAGPSSMANQARNWVPGPCYRQQRVSTTTNQNNNSNFAWTGAAKFKLNGRDSLMNPGVAMASHKDDEDRFFPSSGVLIFGKQGAGNDGVDYSQVLITDEEEIKATNPVATEEYGAVAINNQAANTQAQTGLVHNQGVIPGMVWQNRDVYLQGPIWAKIPHTDGNFHPSPLMGGFGLKHPPPQILIKNTPVPADPPLTFNQAKLNSFITQYSTGQVSVEIEWELQKENSKRWNPEIQYTSNYYKSTNVDFAVNTEGVYSEPRPIGTRYLTRNL

SEQ ID NO: 125 - protein, 623 aa, Adeno-associated virus 9
MPGFYEIVIKVPSDLDEHLPGISDSFVNWVAEKEWELPPDSDMDRNLIEQAPLTVAEKLQRDFLVQWRRVSKAPEALFFVQFEKGESYFHLHVLVETTGVKSMVLGRFLSQIREKLVQTIYRGIEPTLPNWFAVTKTRNGAGGGNKVVDECYIPNYLLPKTQPELQWAWTNMEEYISACLNLAERKRLVAQHLTHVSQTQEQNKENLNPNSDAPVIRSKTSARYMELVGWLVDRGITSEKQWIQEDQASYISFNAASNSRSQIKAALDNAGKIMALTKSAPDYLVGPSLPVDITQNRIYRILQLNGYDPAYAGSVFLGWAQKKFGKRNTIWLFGPATTGKTNIAEAIAHAVPFYGCVNWTNENFPFNDCVDKMVIWWEEGKMTAKVVESAKAILGGSKVRVDQKCKSSAQIDPTPVIVTSNTNMCAVIDGNSTTFEHQQPLQDRMFKFELTRRLEHDFGKVTKQEVKEFFRWASDHVTEVAHEFYVRKGGASKRPAPDDADKSEPKRACPSVADPSTSDAEGAPVDFADRYQNKCSRHAGMLQMLLPCKTCERMNQNFNICFTHGVRDCSECFPGVSESQPVVRKRTYRKLCAIHHLLGRAPEIACSACDLVNVDLDDCVSEQ

SEQ ID NO: 126 - DNA, 2211 bp, Adeno-associated virus
atggctgccgatggttatcttccagattggctcgaggacaaccttagtgaaggaattcgcgagtggtgggctttgaaacctggagcccctcaacccaaggcaaatcaacaacatcaagacaacgctcgaggtcttgtgcttccgggttacaaataccttggacccggcaacggactcgacaagggggagccggtcaacgcagcagacgcggcggccctcgagcacgacaaggcctacgaccagcagctcaaggccggagacaacccgtacctcaagtacaaccacgccgacgccgagttccaggagcggctcaaagaagatacgtcttttgggggcaacctcgggcgagcagtcttccaggccaaaaagaggcttcttgaacctcttggtctggttgaggaagcggctaagacggctcctggaaagaagaggcctgtagagcagtctcctcaggaaccggactcctccgcgggtattggcaaatcgggtgcacagcccgctaaaaagagactcaatttcggtcagactggcgacacagagtcagtcccagaccctcaaccaatcggagaacctcccgcagccccctcaggtgtgggatctcttacaatggcttcaggtggtggcgcaccagtggcagacaataacgaaggtgccgatggagtgggtagttcctcgggaaattggcattgcgattcccaatggctgggggacagagtcatcaccaccagcacccgaacctgggccctgcccacctacaacaatcacctctacaagcaaatctccaacagcacatctggaggatcttcaaatgacaacgcctacttcggctacagcaccccctgggggtattttgacttcaacagattccactgccacttctcaccacgtgactggcagcgactcatcaacaacaactggggattccggcctaagcgactcaacttcaagctcttcaacattcaggtcaaagaggttacggacaacaatggagtcaagaccatcgccaataaccttaccagcacggtccaggtcttcacggactcagactatcagctcccgtacgtgctcgggtcggctcacgagggctgcctcccgccgttcccagcggacgttttcatgattcctcagtacgggtatctgacgcttaatgatggaagccaggccgtgggtcgttcgtccttttactgcctggaatatttcccgtcgcaaatgctaagaacgggtaacaacttccagttcagctacgagtttgagaacgtacctttccatagcagctacgctcacagccaaagcctggaccgactaatgaatccactcatcgaccaatacttgtactatctctcaaagactattaacggttctggacagaatcaacaaacgctaaaattcagtgtggccggacccagcaacatggctgtccagggaagaaactacatacctggacccagctaccgacaacaacgtgtctcaaccactgtgactcaaaacaacaacagcgaatttgcttggcctggagcttcttcttgggctctcaatggacgtaatagcttgatgaatcctggacctgctatggccagccacaaagaaggagaggaccgtttctttcctttgtctggatctttaatttttggcaaacaaggaactggaagagacaacgtggatgcggacaaagtcatgataaccaacgaagaagaaattaaaactactaacccggtagcaacggagtcctatggacaagtggccacaaaccaccagagtgcccaagcacaggcgcagaccggctgggttcaaaaccaaggaatacttccgggtatggtttggcaggacagagatgtgtacctgcaaggacccatttgggccaaaattcctcacacggacggcaactttcacccttctccgctgatgggagggtttggaatgaagcacccgcctcctcagatcctcatcaaaaacacacctgtacctgcggatcctccaacggccttcaacaaggacaagctgaactctttcatcacccagtattctactggccaagtcagcgtggagatcgagtgggagctgcagaaggaaaacagcaagcgctggaacccggagatccagtacacttccaactattacaagtctaataatgttgaatttgctgttaatactgaaggtgtatatagtgaaccccgccccattggcaccagatacctgactcgtaatctgtaa

SEQ ID NO: 127 - protein, 736 aa, Adeno-associated virus; identical to SEQ ID NO: 123

SEQ ID NO: 128 - DNA, 2460 bp, Adeno-associated virus
ggtaattcctccggaaattggcattgcgattccacatggctgggcgaccgagtcattaccaccagcacccggacttgggccctgcccacctacaacaaccacctctacaagcaaatctccagccaatcgggtgccaccaacgacaaccactacttcggctacagcaccccttgggggtattttgatttcaacagattccactgccatttctcaccacgtgactggcagcgactcatcaacaacaactggggattcatggctgccgatggttatcttccagattggctcgaggacactctctctgaaggaatcagacagtggtggaagctcaaacctggcccaccaccgccgaaacctaaccaacaacaccgggacgacagtaggggtcttgtgcttcctgggtacaagtacctcggacccttcaacggactcgacaaaggagagccggtcaacgaggcagacgccgcggccctcgagcacgacaaagcctacgaccaccagctcaagcaaggggacaacccgtacctcaaatacaaccacgcggacgctgaatttcaggagcgtcttcaagaagatacgtctttcgggggcaacctcgggcgagcagtcttccaggccaaaaagagggtactcgagcctcttggtctggttgaggaagctgttaagacggctcctggaaaaaagagacctatagagcagtctcctgcagaaccggactcttcctcgggcatcggcaaatcaggccagcagcccgctaagaaaagactcaattttggtcagactggcgacacagagtcagtcccagaccctcaaccaatcggagaaccccccgcagccccctctggtgtgggatctaatacaatggcttcaggcggtggggcaccaatggcagacaataacgaaggcgccgacggagtgggtaattcctcgggaaattggcattgcgattccacatggatgggcgacagagttatcaccaccagcacaagaacctgggccctccccacctacaataatcacctctacaagcaaatctccagcgaatcgggagccaccaacgacaaccactacttcggctacagcaccccctgggggtattttgactttaacagattccactgtcacttctcaccacgtgactggcagcgactcatcaacaacaactggggatttagacccaagaaactcaatttcaagctcttcaacatccaagtcaaggaggtcacgcagaatgatggaaccacgaccatcgccaataaccttaccagcacggtgcaggtcttcacagactctgagtaccagctgccctacgtcctcggttcggctcaccagggctgccttccgccgttcccagcagacgtcttcatgattcctcagtacggctacttgactctgaacaatggcagccaagcggtaggacgttcttcattctactgtctagagtattttccctctcagatgctgaggacgggaaacaacttcaccttcagctacacttttgaagacgtgcctttccacagcagctacgcgcacagccagagtctggatcggctgatgaatcctctcattgaccagtacctgtattacctgagcaaaactcagggtacaagtggaacaacgcagcaatcgagactgcagttcagccaagctgggcctagctccatggctcagcaggccaaaaactggctaccgggacccagctaccgacagcagcgaatgtctaagacggctaatgacaacaacaacagtgaatttgcttggactgcagccaccaaatattacctgaatggaagaaattctctggtcaatcccgggcccccaatggccagtcacaaggacgatgaggaaaagtatttccccatgcacggaaatctcatctttggaaaacaaggcacaggaactaccaatgtggacattgaatcagtgcttattacagacgaagaagaaatcagaacaactaatcctgtggctacagaacaatacggacaggttgccaccaaccatcagagtcagaacaccacagcttcctatggaagtgtggacagccagggaatcttacctggaatggtgtggcaggaccgcgatgtctatcttcaaggtcccatttgggccaaaactcctcacacggacggacactttcatccttctccgctcatgggaggctttggactgaaacaccctcctccccagatcctgatcaaaaacacacctgtgccagcgaatcccgcgaccactttcactcctggaaagtttgcttcgttcattacccagtattccaccggacaggtcagcgtggaaatagagtgggagctgcagaaagaaaacagcaaacgctggaacccagaaattcagtacacctccaactacaacaagtcggtgaatgtggagtttaccgtggacgcaaacggtgtttattctgaaccccgccctattggcactcgttaccttacccggaacttg

SEQ ID NO: 129 - DNA, 3123 bp, Adeno-associated virus
gaattcgccctttctacggctgcgtcaactggaccaatgaaaactttcccttcaacgattgcgtcgacaagatggtgatctggtgggaggagggaaagatgaccgccaaggtcgtggaatctgccaaagccattctgggtggaggcaaggttcgtgtggaccagaaatgcaagtcttcggcccagatcgacccgactccggtgattgtcacctctaacaccaacatgtgcgccgtgattgacggaaactcgaccaccttcgagcaccagcagccgttgcaagaccggatgttcaaatttgaacttacccgccgtttggatcatgactttgggaaggtcaccaagcaggaagtcaaagactttttccggtgggctcaagatcacgtgactgaggtggagcatgagttctacgtcaaaaagggtggagccaagaaaaggcccgcccccgatgatgtatatataaatgagcccaagcgggcgcgcgagtcagttgcgcagccatcgacgtcagacgcggaagcttcgataaactacgcggacaggtaccaaaacaaatgttctcgtcacgtgggcatgaatctgatgctgtttccctgtcgacaatgcgaaagaatgaatcagaattcaaatatctgcttcacacacgggcaaaaagactgtttggaatgctttcccgtgtcagaatctcaacccgtttctgtcgtcagaaaaacgtatcagaaactttgttacattcatcatatcatgggaaaagtaccagacgcctgcactgcctgcgacctggtaaatgtggacttggatgactgtatttctgagcaataaatgacttaaatcaggtatggctgctgacggttatcttccagattggctcgaggacactctctctgaaggaatcagacagtggtggaagctcaaacctggcccaccaccgccgaaacctaaccaacaacaccgggacgacagtaggggtcttgtgcttcctgggtacaagtacctcggacccttcaacggactcgacaaaggagagccggtcaacgaggcagacgccgcggccctcgagcacgacaaagcctacgaccaccagctcaagcaaggggacaacccgtacctcaaatacaaccacgcggacgctgaatttcaggagcgtcttcaagaagatacgtctttcgggggcaacctcgggcgagcagtcttccaggccaaaaagagggtactcgagcctcttggtctggttgaggaagctgttaagacggctcctggaaaaaagagacctatagagcagtctcctgcagaaccggactcttcctcgggcatcggcaaatcaggccagcagcccgctaagaaaagactcaattttggtcagactggcgacacagagtcagtcccaggccctcaaccaatcggagaaccccccgcagccccctctggtgtgggatctaatacaatggcttcaggcggtggggcaccaatggcagacaataacgaaggcgccgacggagtgggtaattcctcgggaaattggcattgcgattccacatggatgggcgacagagttatcaccaccagcacaagaacctgggccctccccacctacaataatcacctctacaagcaaatctccagcgaatcgggagccaccaacgacaaccactacttcggctacagcaccccctgggggtattttgactttaacagattccactgtcacttctcaccacgtgactggcagcgactcatcaacaacaactggggatttagacccaagaaactcaatttcaagctcttcaacatccaagtcaaggaggtcacgcagaatgatggaaccacgaccatcgccaataaccttaccagcgcggtgcaggtcttcacagactctgagtaccagctgccctacgtcctcggttcggctcaccagggctgccttccgccgttcccagcagacgtcttcatgattcctcagtacggctacttgactctgaacaatggcagccaagcggtaggacgttcttcattctactgtctagagtattttccctctcagatgctgaggacgggaaacaacttcaccttcagctacacttttgaagacgtgcctttccacagcagctacgcgcacagccagagtctggatcggctgatgaatcctctcattgaccagtacctgtattacctgagcaaaactcagggtacaagtggaacaacgcagcaatcgagactgcagttcagccaagctgggcctagctccatggctcagcaggccaaaaactggctaccgggacccagctaccgacagcagcgaatgtctaagacggctaatgacaacaacaacagtgaatttgcttggactgcagccaccaaatattacctgaatggaagaaattctctggtcaatcccgggcccccagtggccagtcacaaggacgatgaggaaaagtatttccccatgcacggaaatctcatctttggaaaacaaggcacaggaactaccaatgtggacattgaatcagtgcttattacagacgaagaagaaatcagaacaactaatcctgtggctacagaacaatacggacaggttgccaccaaccatcagagtcagaacaccacagcttcctatggaagtgtggacagccagggaatcttacctggaatggtgtggcaggaccgcgatgtctatcttcaaggtcccatttgggccaaaactcctcacacggacggacactttcatccttctccgctcatgggaggctttggactgaaacaccctcctccccagatcctgatcaaaaacacacctgtgccagcgaatcccgcgaccactttcactcctggaaagtttgcttcgttcattacccagtattccacctgacaggtcagcgtggaaatagagtgggagctgcagaaagaaaacagcaaacgctggaacccagaaattcagtacacctccaactacaacaagtcggtgaatgtggagtttaccgtggacgcaaacggtgtttattctgaaccccgccctattggcactcgttaccttacccggaacttgtaatttcctgttaatgaataagccgatttatgcgtttcagttgaactttggtctctgcgaagggcgaattcgtttaaacct

SEQ ID NO: 130 - protein, 735 aa, Adeno-associated virus
MAADGYLPDWLEDTLSEGIRQWWKLKPGPPPPKPNQQHRDDSRGLVLPGYKYLGPFNGLDKGEPVNEADAAALEHDKAYDHQLKQGDNPYLKYNHADAEFQERLQEDTSFGGNLGRAVFQAKKRVLEPLGLVEEAVKTAPGKKRPIEQSPAEPDSSSGIGKSGQQPAKKRLNFGQTGDTESVPGPQPIGEPPAAPSGVGSNTMASGGGAPMADNNEGADGVGNSSGNWHCDSTWMGDRVITTSTRTWALPTYNNHLYKQISSESGATNDNHYFGYSTPWGYFDFNRFHCHFSPRDWQRLINNNWGFRPKKLNFKLFNIQVKEVTQNDGTTTIANNLTSAVQVFTDSEYQLPYVLGSAHQGCLPPFPADVFMIPQYGYLTLNNGSQAVGRSSFYCLEYFPSQMLRTGNNFTFSYTFEDVPFHSSYAHSQSLDRLMNPLIDQYLYYLSKTQGTSGTTQQSRLQFSQAGPSSMAQQAKNWLPGPSYRQQRMSKTANDNNNSEFAWTAATKYYLNGRNSLVNPGPPVASHKDDEEKYFPMHGNLIFGKQGTGTTNVDIESVLITDEEEIRTTNPVATEQYGQVATNHQSQNTTASYGSVDSQGILPGMVWQDRDVYLQGPIWAKTPHTDGHFHPSPLMGGFGLKHPPPQILIKNTPVPANPATTFTPGKFASFITQYSTGQVSVEIEWELQKENSKRWNPEIQYTSNYNKSVNVEFTVDANGVYSEPRPIGTRYLTRNL

SEQ ID NO: 131 - DNA, 3123 bp, Adeno-associated virus
gaattcgccctttctacggctgcgtcaactggaccaatgaaaactttcccttcaacgattgcgtcgacaagatggtgatctggtgggaggagggaaagatgaccgccaaggtcgtggaatctgccaaagccattctgggtggaagcaaggttcgtgtggaccagaaatgcaagtcttcggcccagatcgacccgactccggtgattgtcacctctaacaccaacatgtgcgccgtgattgacggaaactcgaccaccttcgagcaccagcagccgttgcaagaccggatgttcaaatttgaacttacccgccgtttggatcatgactttgggaaggtcaccaagcaggaagtcaaagactttttccggtgggctcaagatcacgtgactgaggtggagcatgagttctacgtcaaaaagggtggagccaagaaaaggcccgcccccgatgatgtatatataaatgagcccaagcgggcgcgcgagtcagttgcgcagccatcgacgtcagacgcggaagcttcgataaactacgcgggcaggtaccaaaacaaatgttctcgtcacgtgggcatgaatctgatgctgtttccctgtcgacaatgcgaaagaatgaatcagaattcaaatatctgcttcacacacgggcaaaaagactgtttggaatgctttcccgtgtcagaatctcaacccgtttctgtcgtcagaaaaacgtatcagaaactttgttacattcatcatatcatgggaaaagaaccagacgcctgcactgcctgcgacctggtaaatgtggacttggatgactgtatttctgagcaataaatgacttaaatcaggtatggctgctgacggttatcttccagattggctcgaggacactctctctgaaggaatcagacagtggtggaagctcaaacctggcccaccaccgccgaaacctaaccaacaacaccgggacgacagtaggggtcttgtgcttcctgggtacaagtacctcggacccttcaacggactcgacaaaggagagccggtcaacgaggcagacgccgcggccctcgagcacgacaaagcctacgaccaccagctcaagcaaggggacaacccgtacctcaaatacaaccacgcggacgctgaatttcaggagcgtcttcaagaagatacgtctttcgggggcaacctcgggcgagcagtcttccaggccaaaaagagggtactcgagcctcttggtctggttgaggaagctgttaagacggctcctggaaaaaagagacctatagagcagtctcctgcagaaccggactcttcctcgggcatcggcgaatcaggccagcagcccgctaagaaaagactcaattttggtcagactggcgacacagagtcagtcccagaccctcaaccaatcggagaaccccccgcagccccctctggtgtgggatctaatacaatggcttcaggcggtggggcaccaatggcagacgataacgaaggcgccgacggagtgggtaattcctcgggaaattggcattgcgattccacatggatgggcgacagagttatcaccaccagcacaagaacctgggccctccccacctacaataatcacctctacaagcaaatctccagcgaatcgggagccaccaacgacaaccactacttcggctacagcaccccctgggggtattttgactttaacagattccactgtcacttctcaccacgtgactggcagcgactcatcaacaacaactggggatttagacccaagaaactcaatttcaagctcttcaacatccaagtcaaggaggtcacgcagaatgatggaaccacgaccatcgccaataaccttaccagcacggtgcaggtcttcacagactctgagtaccagctgccctacgtcctcggttcggctcaccagggctgccttccgccgttcccagcagacgtcttcatgattcctcagtacggctacttgactctgaacaatggcagccaagcggtaggacgttcttcattctactgtctagagtattttccctctcagatgctgaggacgggaaacaacttcaccttcagctacacttttgaagacgtgcctttccacagcagctacgcgcacagccagagtctggatcggctgatgaatcctctcattgaccagtacctgtattacctgagcaaaactcagggtacaagtggaacaacgcagcaatcgagactgcagttcagccaagctgggcctagctccatggctcagcaggccaaaaactggctaccgggacccagctaccgacagcagcgaatgtctaagacggctaatgacaacaacaacagtgaatttgcttggactgcagccaccaaatattacctgaatggaagaaattctctggtcaatcccgggcccccaatggccagtcacaaggacgatgaggaaaagtatttccccatgcacggaaatctcatctttggaaaacaaggcacaggaactaccaatgtggacattgaatcagtgcttattacagacgaagaagaaatcagaacaactaatcctgtggctacagaacaatacggacaggttgccaccaaccatcagagtcaggacaccacagcttcctatggaagtgtggacagccagggaatcttacctggaatggtgtggcaggaccgcgatgtctatcttcaaggtcccatttgggccaaaactcctcacacggacggacactttcatccttctccgctcatgggaggctttggactgaaacaccctcctccccagatcctgatcaaaaacacacctgtgccagcgaatcccgcgaccactttcactcctggaaagtttgcttcgttcattacccagtattccaccggacaggtcagcgtggaaatagagtgggagctgcagaaagaaaacagcaaacgctggaacccagaaattcagtacacctccaactacaacaagtcggtgaatgtggagtttaccgtggacgcaaacggtgtttattctgaaccccgccctattggcactcgttaccttacccggaacttgtaatttcctgttaatgaataaaccgatttatgcgtttcagttgaactttggtctctgcgaagggcgaattcgcggccgcta

SEQ ID NO: 132 - protein, 735 aa, Adeno-associated virus
MAADGYLPDWLEDTLSEGIRQWWKLKPGPPPPKPNQQHRDDSRGLVLPGYKYLGPFNGLDKGEPVNEADAAALEHDKAYDHQLKQGDNPYLKYNHADAEFQERLQEDTSFGGNLGRAVFQAKKRVLEPLGLVEEAVKTAPGKKRPIEQSPAEPDSSSGIGESGQQPAKKRLNFGQTGDTESVPDPQPIGEPPAAPSGVGSNTMASGGGAPMADDNEGADGVGNSSGNWHCDSTWMGDRVITTSTRTWALPTYNNHLYKQISSESGATNDNHYFGYSTPWGYFDFNRFHCHFSPRDWQRLINNNWGFRPKKLNFKLFNIQVKEVTQNDGTTTIANNLTSTVQVFTDSEYQLPYVLGSAHQGCLPPFPADVFMIPQYGYLTLNNGSQAVGRSSFYCLEYFPSQMLRTGNNFTFSYTFEDVPFHSSYAHSQSLDRLMNPLIDQYLYYLSKTQGTSGTTQQSRLQFSQAGPSSMAQQAKNWLPGPSYRQQRMSKTANDNNNSEFAWTAATKYYLNGRNSLVNPGPPMASHKDDEEKYFPMHGNLIFGKQGTGTTNVDIESVLITDEEEIRTTNPVATEQYGQVATNHQSQDTTASYGSVDSQGILPGMVWQDRDVYLQGPIWAKTPHTDGHFHPSPLMGGFGLKHPPPQILIKNTPVPANPATTFTPGKFASFITQYSTGQVSVEIEWELQKENSKRWNPEIQYTSNYNKSVNVEFTVDANGVYSEPRPIGTRYLTRNL

SEQ ID NO: 133 - DNA, 3113 bp, Adeno-associated virus
gaattcgccctttctacggctgcgtcaactggaccaatgaaaactttcccttcaacgattgcgtcgacaagatggtgatctggtgggaggagggaaagatgaccgccaaggtcgtggaatctgccaaagccattctgggtggaagcaaggttcgtgtggaccagaaatgcaagtcttcggcccagatcgacccgactccggtgattgtcacctctaacaccaacatgtgcgccgtgattgacggaaactcgaccaccttcgagcaccagcagccgttgcaagaccggatgttcaaatttgaacttacccgccgtttggatcatgactttgggaaggtcaccaagcaggaagtcaaagactttttccggtgggctcaagatcacgtgactgaggtggagcatgagttctacgtcaaaaagggtggagccaagaaaaggcccgcccccgatgatgtatatataaatgagcccaagcgggcgcgcgagtcagttgcgcagccatcgacgtcagacgcggaagcttcgataaactacgcggacaggtaccaaaacaaatgttctcgtcacgtgggcatgaatctgatgctgtttccctgtcgacaatgcgaaagaatgaatcagaattcaaatatctgcttcacacacgggcaaaaagactgtttggaatgctttcccgtgtcagaatctcaacccgttcctgtcgtcagaaaaacgtatcagaaactttgttacattcatcatatcatgggaaaagtaccagacgcctgcactgcctgcgacctggtaaatgtggacttggatgactgtatttctgagcaataaatgacttaaatcaggtatggctgctgacggttatcttccagattggctcgaggacactctctctgaaggaatcagacagtggtggaagctcaaacctggcccaccaccgccgaaacctaaccaacaacaccgggacgacagtaggggtcttgtgcttcctgggtacaagtacctcggacccttcaacggactcgacaaaggagagccggtcaacgaggcagacgccgcggccctcgagcacgacaaagcctacgaccaccagctcaagcaaggggacaacccgtacctcaaatacaaccacgcggacgctgaatttcaggagcgtcttcaagaagatacgtctttcgggggcaacctcgggcgagcagtcttccaggccaaaaagagggtactcgagcctcttggtctggttgaggaagctgttaagacggctcctggaaaaaagagacctatagagcagtctcctgcagaaccggactcttcctcgggcatcggcaaatcaggccagcagcccgctaagaaaagactcaattttggtcagactggcgacacagagtcagtcccagaccctcaaccaatcggagaaccccccgcagccccctctggtgtgggatctaatacaatggcttcaggcggtggggcaccaatggcagacaataacgaaggcgccgacggagtgggtaattcctcgggaaattggcattgcgattccacatggatgggcgacagagttatcaccaccagcacaagaacctgggccctccccacctacaataatcacctctacaagcaaatctccagcgaatcgggagccaccaacgacaaccactacttcggctacagcaccccctgggggtattttgactttaacagattccactgtcacttctcaccacgtgactggcagcgactcatcaataacaactggggatttagacccaagaaactcaatttcaagctcttcaacatccaagtcaaggaggtcacgcagaatgatggaaccacgaccatcgccaataaccttaccagcacggtgcaggtcttcacagactctgagtaccagctgccctacgtcctcggttcggctcaccagggctgccttccgccgttcccagcagacgtcttcatgattcctcagtacggctacttgactctgaacaatggcagccaagcggtaggacgttcttcattctactgtctagagtattttccctctcagatgctgaggacgggaaacaacttcaccttcagctacacttttgaagacgtgcctttccacagcagctacgcgcacagccagagtctggatcggctgatgaatcctctcattgaccagtacctgtattacctgagcaaaactcagggtacaagtggaacaacgcagcaatcgagactgcagttcaaccaagctgggcctagctccatggctcagcaggccaaaaactggctaccgggacccagctaccgacagcagcgaatgtctaagacggctaatgacaacaacaacagtgaatttgcttggactgcagccaccaaatattacccgaatggaagaaattctctggtcaatcccgggcccccaatggccagtcacaaggacgatgaggaaaagtatttccccatgcacggaaatctcatctttggaaaacaaggcacaggaactaccaatgtggacattgaatcagtgcttattacagacgaagaagaaatcagaacgactaatcctgtggctacagaacaatacggacaggttgccaccaaccgtcagagtcagaacaccacagcttcctatggaagtgtggacagccagggaatcttacctggaatggtgtggcaggaccgcgatgtctatcttcaaggtcccatttgggccaaaactcctcacacggacggacactttcatccttctccgctcatgggaggctttggactgaaacaccctcctccccagatcctgatcaaaaacacacctgtgccagcgaatcccgcgaccactttcactcctggaaagtttgcttcgttcattacccagtattccaccggacaggtcagcgtggaaatagagtgggagctgcagaaagaaaacagcaaacgctggaacccggaaattcagtacacctccaactacaacaagtcggtgaatgtggagtttaccgtggacgcaaacggtgtttattctgaaccccgccctattggcactcgttaccttacccggaacttgtaatttcctgttaatgaataaaccgatttatgcgtttcagttgaactttggtctctgcgaagggcgaattc

SEQ ID NO: 134 - protein, 735 aa, Adeno-associated virus
MAADGYLPDWLEDTLSEGIRQWWKLKPGPPPPKPNQQHRDDSRGLVLPGYKYLGPFNGLDKGEPVNEADAAALEHDKAYDHQLKQGDNPYLKYNHADAEFQERLQEDTSFGGNLGRAVFQAKKRVLEPLGLVEEAVKTAPGKKRPIEQSPAEPDSSSGIGKSGQQPAKKRLNFGQTGDTESVPDPQPIGEPPAAPSGVGSNTMASGGGAPMADNNEGADGVGNSSGNWHCDSTWMGDRVITTSTRTWALPTYNNHLYKQISSESGATNDNHYFGYSTPWGYFDFNRFHCHFSPRDWQRLINNNWGFRPKKLNFKLFNIQVKEVTQNDGTTTIANNLTSTVQVFTDSEYQLPYVLGSAHQGCLPPFPADVFMIPQYGYLTLNNGSQAVGRSSFYCLEYFPSQMLRTGNNFTFSYTFEDVPFHSSYAHSQSLDRLMNPLIDQYLYYLSKTQGTSGTTQQSRLQFNQAGPSSMAQQAKNWLPGPSYRQQRMSKTANDNNNSEFAWTAATKYYPNGRNSLVNPGPPMASHKDDEEKYFPMHGNLIFGKQGTGTTNVDIESVLITDEEEIRTTNPVATEQYGQVATNRQSQNTTASYGSVDSQGILPGMVWQDRDVYLQGPIWAKTPHTDGHFHPSPLMGGFGLKHPPPQILIKNTPVPANPATTFTPGKFASFITQYSTGQVSVEIEWELQKENSKRWNPEIQYTSNYNKSVNVEFTVDANGVYSEPRPIGTRYLTRNL

SEQ ID NO: 135 - DNA, 3122 bp, Adeno-associated virus
agcggccgcgaattcgccctttctacggctgcgtcaactggaccaatgaaaactttcccttcaacgattgcgtcgacaagatggtgatctggtgggaggagggaaagatgaccgccaaggtcgtggaatctgccaaagccattctgggtggaagcaaggttcgtgtggaccagaaatgcaggtcttcggcccagatcgacccgactccggtgattgtcacctctaacaccaacatgtgcgccgtgattgacggaaactcgaccaccttcgagcaccagcagccgttgcaagaccggatgttcaaatttgaacttacccgccgtttggatcatgactttgggaaggtcaccaagcaggaagtcaaagactttttccggtgggctcaagatcacgtgactgaggtggagcatgagttctacgtcaaaaagggtggagccaagaaaaggcccgcccccgatgatgtatatataaatgagcccaagcgggcgcgcgagtcagttgcgcagccatcgacgtcagacgcggaagcttcgataaactacgcggacaggtaccaaaacaaatgttctcgtcacgtgggcatgaatctgatgctgtttccctgtcgacaatgcgaaagaatgaatcagaattcaaatatctgcttcacacacgggcaaaaagactgtttggaatgctttcccgtgtcagaatctcaacccgtttctgtcgtcagaaaaacgtatcagaaactttgttacattcatcatatcatgggaaaagtaccagacgcctgcactgcctgcgacctggtaaatgtggacttggatgactgtatttctgagcaataaatgacttaaatcaggtatggctgctgacggttatcttccagattggctcgaggacactctctctgaaggaatcagacagtggtggaagctcaaacctggcccaccaccgccgaaacctaaccaacaacaccgggacgacagtaggggtcttgtgcttcctgggtacaagtacctcggacccttcaacggactcgacaaaggagagccggtcaacgaggcagacgccgcggccctcgagcacgacaaagcctacgaccaccagctcaagcaaggggacaacccgtacctcaaatacaaccacgcggacgctgaatttcaggagcgtcttcaagaagatacgtctttcgggggcaacctcgggcgagcagtcttccaggccaaaaagagggtactcgagcctcttggtctggttgaggaagctgttaagacggctcctggaaaaaagagacctatagagcagtctcctgcagaaccggactcttcctcgggcatcggcaaatcaggccagcagcccgctaagaaaagactcaattttggtcagactggcgacacagagtcagtcccagaccctcaaccaatcggagaaccccccgcagccccctctggtgtgggatctaatacaatggcttcaggcggtggggcaccaatggcagacaataacgaaggcgccgacggagtgggtaattcctcgggaaattggcattgcgattccacatggatgggcgacagagttatcaccaccagcacaagaacctgggccctccccacctacaataatcgcctctacaagcaaatctccagcgaatcgggagccaccaacgacaaccactacttcggctacagcaccccctgggggtattttgactttaacagattccactgtcacttctcaccacgtgactggcagcgactcatcaacaacaactggggatttagacccaagaaactcaatttcaagctcttcaacatccaagtcaaggaggtcacgcagaatgatggaaccacgaccatcgccaataaccttaccagcacggtgcaggtcttcacagactctgagtaccagctgccctacgtcctcggttcggctcaccagggctgccttccgccgttcccagcagacgtcttcatgattcctcagtacggctacttgactctgaacaatggcagccaagcggtaggacgttcttcattctactgtctagagtattttccctctcagatgctgaggacgggaaacaacttcaccttcagctacacttttgaagacgtgcctttccacagcagctacgcgcacagccagagtctggatcggctgatgaatcctctcattgaccagtacctgtattacctgagcaaaactcagggtacaagtggaacaacgcagcaatcgagactgcagttcagccaagctgggcctagctccatggctcagcaggccaaaaactggctaccgggacccagctaccgacagcagcgaatgtctaagacggctaatgacaacaacaacagtgaatttgcttggactgcagccaccaaatattacctgaatggaagaaattctctggtcaatcccgggcccccaatggccagtcacaaggacgatgaggaaaagtatttccccatgcacggaaatctcatctttggaaaacaaggcacaggaactaccaatgtggacattgaatcagtgcttattacagacgaagaagaaatcagaacaactaatcctgtggctacagaacaatacggacaggttgccaccaaccatcagagtcagaacaccacagcttcctatggaagtgtggacagccagggaatcttacctggaatggtgtggcaggaccgcgatgtctatcttcaaggtcccatttgggccaaaactcctcacacggacggacactttcatccttctccgctcatgggaggctttggactgaaacaccctcctccccagatcctgatcaaaaacacacctgtgccagcgaatcccgcgaccactttcactcctggaaagtttgcttcgttcattacccagtattccaccggacaggtcagcgtggaaatagagtgggagctgcagaaagaaaacagcaaacgctggaacccagaaattcagtacacctccaactacaacaagtcggtgaatgtggagtttaccgtggacgcaaacggtgtttattctgaaccccgccctattggcactcgttaccttacccggaacttgtaatttcctgttaatgaataaaccgatttatgcgtttcagttgaactttggtctctgcgaagggcgaattc

SEQ ID NO: 136 - protein, 735 aa, Adeno-associated virus
MAADGYLPDWLEDTLSEGIRQWWKLKPGPPPPKPNQQHRDDSRGLVLPGYKYLGPFNGLDKGEPVNEADAAALEHDKAYDHQLKQGDNPYLKYNHADAEFQERLQEDTSFGGNLGRAVFQAKKRVLEPLGLVEEAVKTAPGKKRPIEQSPAEPDSSSGIGKSGQQPAKKRLNFGQTGDTESVPDPQPIGEPPAAPSGVGSNTMASGGGAPMADNNEGADGVGNSSGNWHCDSTWMGDRVITTSTRTWALPTYNNRLYKQISSESGATNDNHYFGYSTPWGYFDFNRFHCHFSPRDWQRLINNNWGFRPKKLNFKLFNIQVKEVTQNDGTTTIANNLTSTVQVFTDSEYQLPYVLGSAHQGCLPPFPADVFMIPQYGYLTLNNGSQAVGRSSFYCLEYFPSQMLRTGNNFTFSYTFEDVPFHSSYAHSQSLDRLMNPLIDQYLYYLSKTQGTSGTTQQSRLQFSQAGPSSMAQQAKNWLPGPSYRQQRMSKTANDNNNSEFAWTAATKYYLNGRNSLVNPGPPMASHKDDEEKYFPMHGNLIFGKQGTGTTNVDIESVLITDEEEIRTTNPVATEQYGQVATNHQSQNTTASYGSVDSQGILPGMVWQDRDVYLQGPIWAKTPHTDGHFHPSPLMGGFGLKHPPPQILIKNTPVPANPATTFTPGKFASFITQYSTGQVSVEIEWELQKENSKRWNPEIQYTSNYNKSVNVEFTVDANGVYSEPRPIGTRYLTRNL

SEQ ID NO: 137 - DNA, 3121 bp, Adeno-associated virus
gaattcgcccttcgcagagaccaaagttcaactgaaacgaatcaaccggtttattgattaacaagcaattacagattacgggtgaggtaacgggtgccgatggggcgaggctcagaataagtgccatctgtgttaacagcaaagtccacatttgtagatttgtagtagttggaagtgtattgaatctctgggttccagcgtttgctgttttctttctgcagctcccattcaatttccacgctgacctgtccggtgctgtactgcgtgatgaacgacgccagcttagcttgactgaaggtagttggaggatccgcgggaacaggtgtattcttaatcaggatctgaggaggcgggtgtttcagtccaaagccccccatcagcggcgagggatgaaagtttccgtccgtgtgaggaatcttggcccagataggaccctgcaggtacacgtcccggttctgccagaccatgccaggtaaggctccttgactgttgacggcccctacaataggagcggcgttttgctgttgcaggttatcggccaccacgccgtactgttctgtggccactgggttggtggttttaatttcttcctcactggttagcataacgctgctatagtccacgttgccttttccagctccctgtttcccaaacattaagactccgctggacggaaaaaatcgctcttcgtcgtccttgtgggttgccatagcgacaccgggatttaccagagagtctctgccattcagatgatacttggtggcaccggtccaggcaaagttgctgttgttattttgcgacagtgtcgtggagacgcgttgctgccggtagcagggcccgggtagccagtttttggcctgagccgacatgttattaggcccggcctgagaaaatagcaactgctgagttcctgcggtacctcccgtggactgagtccgagacaggtagtacaggtactggtcgatgagggggttcatcagccggtccaggctttggctgtgcgcgtagctgctgtgaaaaggcacgtcctcaaactggtagctgaactcaaagttgttgcccgttctcagcatttgagaaggaaagtactccaggcagtagaaggaggaacggcccacggcctgactgccattgttcagagtcaggtacccgtactgaggaatcatgaagacgtccgccgggaacggaggcaggcagccctggcgcgcagagccgaggacgtacgggagctggtattccgagtccgtaaagacctgaatcgtgctggtaaggttattggcgatggtcttggtgccttcattctgcgtgacctccttgacctggatgttgaagagcttgaagttgagtctcttgggccggaatccccagttgttgttgatgagtcgctgccagtcacgtggtgagaagtggcagtggaatctgttaaagtcaaaatacccccagggggtgctgtagccgaagtaggtgttgtcgttggtgcttcctcccgaagtcccgttggagatttgcttgtagaggtggttgttgtaggtggggagggcccaggttcgggtgctggtggtgatgactctgtcgcccagccatgtggaatcgcaatgccaatttcctgaggaactacccactccgtcggcgccttcgttattgtctgccattggagcgccaccgcctgcagccattgtaccagatcccagaccagaggggcctgcggggggttctccgattggttgagggtcgggcactgactctgagtcgccagtctgcccaaagttgagtctctttttcgcgggctgctggcctttcttgccgatgcccgtagtggagtctggagaacgctggggtgatggctctaccggtctcttctttccaggagccgtcttagcgccttcctcaaccagaccgagaggttcgagaacccgcttcttggcctggaagactgctcgtccgaggttgcccccaaaagacgtatcttcttgcagacgctcctgaaactcggcgtcggcgtggttataccgcaggtacggattgtcacccgctttgagctgctggtcgtaggccttgtcgtgctcgagggccgctgcgtccgccgcgttgacgggctcccccttgtcgagtccgttgaagggtccgaggtacttgtagccaggaagcaccagaccccggccgtcgtcctgcttttgctggttggctttgggcttcggggctccaggtttcagcgcccaccactcgcgaatgccctcagagaggttgtcctcgagccaatctggaagataaccatcggcagccatacctgatctaaatcatttattgttcaaagatgcagtcatccaaatccacattgaccagatcgcaggcagtgcaagcgtctggcacctttcccatgatatgatgaatgtagcacagtttctgatacgcctttttgacgacagaaacgggttgagattctgacacgggaaagcactctaaacagtctttctgtccgtgagtgaagcagatatttgaattctgattcattctctcgcattgtctgcagggaaacagcatcagattcatgcccacgtgacgagaacatttgttttggtacctgtccgcgtagttgatcgaagcttccgcgtctgacgtcgatggctgcgcaactgactcgcgcacccgtttgggctcacttatatctgcgtcactgggggcgggtcttttcttggctccaccctttttgacgtagaattcatgctccacctcaaccacgtgatcctttgcccaccggaaaaagtctttgacttcctgcttggtgaccttcccaaagtcatgatccagacggcgggtgagttcaaatttgaacatccggtcttgcaacggctgctggtgttcgaaggtcgttgagttcccgtcaatcacggcgcacatgttggtgttggaggtgacgatcacgggagtcgggtctatctgggccgaggacttgcatttctggtccacgcgcaccttgcttcctccgagaatggctttggccgactccacgaccttggcggtcatcttcccctcctcccaccagatcaccatcttgtcgacacagtcgttgaagggaaagttctcattggtccagttgacgcagccgtagaagggcgaattc

SEQ ID NO: 138 - protein, 733 aa, Adeno-associated virus
MAADGYLPDWLEDNLSEGIREWWDLKPGAPKLKANQQKQDDGRGLVLPGYKYLGPFHGLDKGEPVNAADAAALEHDKAYDQQLKAGDNPYLRYNHADAEFQERLQEDTSFGGNLGRAVFQAKKRVLEPLGLVEEGAKTAPGKKRPLESPQEPDSSSGIGKKGKQPAKKRLNFEEDTGAGDGPPEGSDTSAMSSDIEMRAAPGGNAVDAGQGSDGVGNASGDWHCDSTWSEGKVTTTSTRTWVLPTYNNHLYLRLGTTSNSNTYNGFSTPWGYFDFNRFHCHFSPRDWQRLINNNWGLRPKAMRVKIFNIQVKEVTTSNGETTVANNLTSTVQIFADSSYELPYVMDAGQEGSLPPFPNDVFMVPQYGYCGIVTGENQNQTDRNAFYCLEYFPSQMLRTGNNFEMAYNFEKVPFHSMYAHSQSLDRLMNPLLDQYLWHLQSTTSGETLNQGNAATTFGKIRSGDFAFYRKNWLPGPCVKQQRFSKTASQNYKIPASGGNALLKYDTHYTLNNRWSNIAPGPPMATAGPSDGDFSNAQLIFPGPSVTGNTTTSANNLLFTSEGEIAATNPRDTDMFGQIADNNQNATTAPITGNVTAMGVLPGMVWQNRDIYYQGPIWAKIPHADGHFHPSPLIGGFGLKHPPPQIFIKNTPVPANPATTFTAARVDSFITQYSTGQVAVQIEWEIEKERSKRRNPEVQFTSNYGNQSSMLWAPDTTGKYTEPRVIGSRYLTNHL

SEQ ID NO: 139 - protein, 735 aa, Adeno-associated virus
MAADGYLPDWLEDTLSEGIRQWWKLKPGPPPPKPNQQHRDDSRGLVLPGYKYLGPFNGLDKGEPVNEADAAALEHDKAYDHQLKQGDNPYLKYNHADAEFQERLQEDTSFGGNLGRAVFQAKKRVLEPLGLVEEAVKTAPGKKRPIEQSPAEPDSSSGIGKSGQQPAKKRLNFGQTGDTESVPDPQPIGEPPAAPSGVGSNTMASGGGAPMADNNEGADGVGNSSGNWHCDSTWMGDRVITTSTRTWALPTYNNHLYKQISSESGATNDNHYFGYSTPWGYFDFNRFHCHFSPRDWQRLINNNWGFRPKKLNFKLFNIQVKEVTQNDGTTTIANNLTSTVQVFTDSEYQLPYVLGSAHQGCLPPFPADVFMIPQYGYLTLNNGSQAVGRSSFYCLEYFPSQMLRTGNNFTFSYTFEDVPFHSSYAHSQSLDRLMNPLIDQYLYYLSKTQGTSGTTQQSRLQFSQAGPSSMAQQAKNWLPGPSYRQQRMSKTANDNNNSEFAWTAATKYYLNGRNSLVNPGPPMASHKDDEEKYFPMHGNLIFGKQGTGTTNVDIESVLITDEEEIRTTNPVATEQYGQVATNHQSQNTTASYGSVDSQGILPGMVWQDRDVYLQGPIWAKIPHTDGHFHPSPLMGGFGLKHPPPQILIKNTPVPANPATTFTPGKFASFITQYSTGQVSVEIEWELQKENSKRWNPEIQYTSNYNKSVNVEFTVDANGVYSEPRPIGTRYLTRNL

SEQ ID NO: 140 - DNA, 3127 bp, Adeno-associated virus
gcggccgcgaattcgcccttcgcagagaccaaagttcaactgaaacgaatcaaccggtttattgattaacatgcaattacagattacgggtgaggtaacgagtgccaatagggcgaggctcagagtaaacaccctggctgtcaacggcaaagtccacaccagtctgcttttcaaagttggaggtgtactgaatctccgggtcccagcgcttgctgttttccttctgcagctcccactcgatttccacgctgacttgtccggtgctgtactgtgtgatgaacgaagcaaacttggcaggagtaaacacctccggaggattagcgggaacgggagtgttcttgatcaggatctgaggaggcggatgtttaagtccaaagccgcccatcaaaggagacgggtgaaagttgccatccgtgtgaggaatcttggcccagatgggaccctgcaggtacacgtcccggttctgccagaccatgccaggtaaggctccctggttgttgacaacttgtgtctgggctgcagtattagccgcttgtaagttgctgctgactatcccgtattcttccgtggctacaggattagtaggacgaatttcttcttcatttgtcattaacacattttccaatgtagttttgttagttgctccagtttttccaaaaatcaggactccgctggatgggaaaaagcggtcctcgtcgtccttgtgagttgccatggcgacgccgggattaaccaacgagtttctgccgttcaggtgatatttggtggcaccagtccaagcaaagttgctgttgttgttttgatccagcgttttggagaccctttgttgccggaagcagggtccaggtaaccaattcttggcttgttcggccatagttgaaggcccgccctggtaaaactgcagttcccgattgccagctgtgcctcctgggtcactctgtgttctggccaggtagtacaagtactggtcgatgaggggattcatcagccggtccaggctctggctgtgtgcgtagctgctgtggaaaggcacgtcctcgaagctgtagctgaactcaaagttgttgcccgttctcagcatctgagaggggaagtactccaggcagtagaaggaggaacgtcccacagactgactgccattgttgagagtcaggtagccgtactgaggaatcatgaagacgtccgccgggaacggaggcaggcagccctggtgcgcagagccgaggacgtacggcagctggtattccgagtccgagaatacctgaatcgtgctggtaaggttattagcgatggtcgtaacgccgtcattcgtcgtgacctccttgacctggatgttgaagagcttgaaccgcagcttcttgggccggaatccccagttgttgttgatgagtcgctgccagtcacgtggtgagaagtggcagtggaatctgttaaagtcaaaatacccccagggggtgctgtagccgaagtaggtgttgtcgttggtactacctgcagtttcactggagatttgctcgtagaggtggttgttgtaggtgggcagggcccaggttcgggtgctggtggtaatgactctgtcgcccagccatgtggaatcgcaatgccaatttcctgaggcattacccactccgtcggcaccttcgttattgtctgccattggtgcgccaccgcctgcagccactgtaccagatcccacactagagggcgctgctggaggttctccgagaggttgagggtcggggactgactctgagtcgccagtctgaccgaaattgagtctctttctggcgggctgctggcccttcttgccgatgcccgtggaggagtcgggggaacgctgaggtgacggctctaccggtctcttctttgcaggagccgtcttagcgccttcctcaaccagaccgagaggttcgagaacccgcttcttggcctggaagactgctcgcccgaggttgcccccaaatgacgtatcttcttgcagacgctcctgaaactcggcgtcggcgtggttataccgcaggtacgggttgtcacccgcattgagctgctggtcgtaggccttgtcgtgctcgagggccgctgcgtccgccgcgttgacgggctcccccttgtcgagtccgttgaagggtccgaggtacttgtagccaggaagcaccagaccccggccgttgtcctgcttttgctggttggctttgggtttcggggctccaggtttcaggtcccaccactcgcgaatgccctcagagaggttgtcctcgagccaatctggaagataaccatcggcagccatacctgatttaaatcatttattgttcaaagatgcagtcatccaaatccacattgaccagatcgcaggcagtgcaagcgtctggcacctttcccatgatatgatgaatgtagcacagtttctgatacgcctttttgacgacagaaacgggtttagattctgacacgggaaagcactctaaacagtctttctgtccgtgagtgaagcagatatttgaattctgattcattctctcgcattgtctgcagggaaacagcatcagattcatgcccacgtgacgagaacatttgttttggtacctgtctgcgtagttgatcgaagcttccgcgtctgacgtcgatggctgcgcaactgactcgcgcacccgtttgggctcacttatatctgcgtcactgggggcgggtcttttcttggctccaccctttttgacgtagaattcatgctccacctcaaccacgtaatcctttgcccaccggaaaaagtctttgacttcctgcttggtgaccttcccaaagtcatgatccagacggcgggtgagttcaaatttgaacatccggtcttgcaacggctgctggtgttcgaaggtcgttgagttcccgtcgatcacggcgcacatgttggtgttggagatgacgatcgcgggagtcgggtctatctgggccgaggacttgcatttctggtccacgcgcaccttgcttcctccgagaatggctttggccgactccacgaccttggcggtcatcttcccctcctcccaccagatcaccatcttgtcgacacagtcgttgaagggaaagttctcattggtccagttgacgcagccgtagaaagggcgaattc

SEQ ID NO: 141 - protein, 728 aa, Adeno-associated virus
MAADGYLPDWLEDNLSEGIREWWDLKPGAPKPKANQQKQDDGRGLVLPGYKYLRPFNGLDKGEPVNEADAAALEHDKAYDKQLEQGDNPYLKYNHADAEFQERLQEDTSFGGNLGRAVFQAKKRVLEPLGLVEEVAKTAPGKKRPIESPDSSTGIGKKGQQPAKKKLNFGQTGDSESVPDPQPLGEPPAAPSGLGSGTMAAGGGAPMADNNEGADGVGNASGNWHCDSTWLGDRVITTSTRTWALPTYNNHLYKQISSQSGATNDNHFFSYSTPWGYFDFNRFHCHFSPRDWQRLINNNWGFRPRKLRFKLFNIQVKEVTTNDGVTTIANNLTSTIQVFSDSEYQLPYVLGSAHQGCLPPFPADVFMIPQYGYLTLNNGSQSVGRSSFYCLEYFPSQMLRTGNNFEFSYTFEEVPFHSSYVHSQSLDRLMNPLIDQYLYYLARTQSTTGSTRELQFHQAGPNTMAEQSKNWLPGPCYRQQRLSKNIDSNNNSNFAWTGATKYHLNGRNSLTNPGVAMATNKDDEDQFFPINGVLVFGKTGAANKTTLENVLMTSEEEIKTTNPVATEEYGVVSSNLQSSTAGPQTQTVNSQGALPGMVWQNRDVCLQGPIWAKIPHTDGNFHPSPLMGGFGLKHPPPQILIKNTPVPANPPEVFTPAKFASFITQYSTGQVSVEIEWELQKENSKRWNPEIQYTSNYAKSNNVEFAVNNEGVYTEPRPIGTRYLTRNL

SEQ ID NO: 142 - DNA, 3106 bp, Adeno-associated virus
gcggccgcgaattcgcccttcgcagagaccaaagttcaactgaaacgaatcaaccggtttattgattaacaagtaattacaggttacgggtgaggtaacgggtgccaatggggcgaggctcagtataaaccccttcgttgttgacagcaaattccacattattagacttggcataatttgaggtgtactgaatctctggattccagcgtttgctgttttctttctgcagttcccactcgatctccacgctgacctggccggtgctgtactgcgtgataaatgaggcaaacttggcaggagtaaacacctctggaggattagcaggtaccggggtgtttttgatgagaatttgaggaggcgggtgtttgagtccaaatccgcccatcaggggagacgggtgaaagttgccgtccgtgtgaggaattttggcccagatgggaccctgcaggcacacgtcccggttctgccagaccatgccgggcagagccccctggctgttgacagtctgtgtctggggtccggccgtagacgattgcaggttgctggagaccacaccgtattcttctgtagccacgggattggtggttttgatctcctcctcgctggtcattagcacgttttccagcgttgtcttgttggcagcccccgttttgccaaaaaccagcactccgttgatgggaaagaactggtcctcgtcgtccttgttggtggccatggctacgcccgggttggttaatgaatttctaccattcagatggtatttagtggccccggtccaggcaaagttactgttgttgttgctgtctatgttttttgacagtctctgctgccgataacagggtccgggcagccagttctttgattgctcggccatggtgttgggcccagcctgatggaactgcagctcccttgtggaccccgtagtgctctgggtccgggccaggtagtacaggtactggtcgatgaggggattcatcagccggtctaggctctggctgtgcacatagctgctgtggaaaggcacttcctcaaaggtgtagctgaattcaaagttattgcccgttctcagcatctgagaaggaaagtactccaggcagtagaaggaggaacgtcccacagactgactgccgttgtttagagtcagatatccgtactgaggaatcatgaacacgtccgcagggaacggagggaggcagccctggtgcgcagagccgaggacgtacggcagttggtactccgagtccgagaagacctgaatcgtgctggtaaggttattagcgatggtcgtaacgccgtcgttcgtcgtgacctccttgacctggatgttgaacaacttgaaccgcagctttctgggccggaatccccagttgttgttgatgagtcgctgccagtcacgtggtgagaagtggcagtggaatctgttgaagtcaaaatagccccagggggtgctgtagctgaagaagtggttgtcgttggtagccccgctctgacttgatatctgcttgtagaggtggttgttgtaggtgggcagggcccaggtgcgggtgctggtggtgatgactctgtcgcccagccatgtggaatcgcaatgccaatttccggaggcattacccactccgtcggcgccttcgttattgtctgccattggtgcgccaccgcctgcagccattgtaccagatcccagacctgagggcgcggcgggaggttctccgagaggttgggggtcgggcactgactctgagtcgccagtctgcccaaagttgagcttctttttagcgggctgctggcctttcttgccgatgcccgtggaggagtcgggggattctatgggtctcttctttccaggagccgtcttagcgacttcctcaaccagaccgagaggttcgagaacccgcttcttggcctggaagactgctcgcccgaggttgcccccaaaagacgtatcttcttgaagacgctcctgaaactcggcgtcggcgtggttgtacttgaggtacgggttgtccccctgctcgagctgcttgtcgtaggccttgtcgtgctcgagggccgcggcgtctgcctcgttgaccggctctcccttgtcgagtccgttgaagggtctgaggtacttgtagccaggaagcaccagaccccggccgtcgtcctgcttttgctggttggctttgggtttcggggctccaggtttcaagtcccaccactcgcgaatgccctcagagaggttgtcctcgagccaatctggaagataaccatcggcagccatacctggtttaagtcatttattgctcagaaacacagtcatccaggtccacgttgaccagatcgcaggccgagcaagcaatctcgggagcccgccccagcagatgatgaatggcacagagtttccgatacgtcctctttctgacgaccggttgagattctgacacgccggggaaacattctgaacagtctctggtcccgtgcgtgaagcaaatgttgaaattctgattcactctctcgcatgtcttgcagggaaacagcatctgaagcatgcccgcgtgacgagaacatttgttttggtacctgtcggcaaagtccaccggagctccttccgcgtctgacgtcgatggattcgcgactgaggggcaggcccgcttgggctcgcttttatccgcgtcatcgggggcgggtctcttgttggccccaccctttctgacgtagaacccatgcgccacctcggtcacgtgatcctgcgcccagcggaagaaccttttgacttcctgctttgtcaccttgccaaagttatgctccagacggcgggtgggttcaaatttgaacatccggtcctgcaacggctgctggtgctcgaaggtggcgctgttcccgtcaatcacggcgcacatgttggtgttggaggtgacggtcacgggggtggggtcgatctgggcggacgacttgcacttttggtccacgcgcaccttgctgccgccgagaatggccttggcggactccacgaccttggccgtcatcttgccctcctcccaccagatcaccatcttgtcggcgcaatcgttgaagggaaagttctcattggtccagttgacgcagccgtagaaagggcgaattc

SEQ ID NO: 143 - protein, 728 aa, Adeno-associated virus
MAADGYLPDWLEDNLSEGIREWWDLKPGAPKPKANQQKQDDGRGLVLPGYKYLGPFNGLDKGEPVNEADAAALEHDKAYDKQLEQGDNPYLKYNHADAEFQERLQEDTSFGGNLGRAVFQAKKRVLEPLGLVEEGAKTASGKKRPIESPDSSTGIGKKGQQPAKKKLNFGQTGDSESVPDPQPLGEPPAAPSGLGSGTMAAGGGAPMADNNEGADGVGNASGNWHCDSTWLGDRVITTSTRTWALPTYNNHLYKQISSQSGATNDNHFFGYSTPWGYFDFNRFHCHFSPRDWQRLINNNWGFRPRKLRFKLFNIQVKEVTTNDGVTTIANNLTSTIQVFSDSEYQLPYVLGSAHQGCLPPFPADVFMIPQYGYLTLNNGSQSVGRSSFCCLEYFPSQMLRTGNNFEFSYTFEEVPFHSSYAHSQSLDRLMNPLIDQYLYYLARTQSTTGSTRELQFHQAGPNTVAEQSKNWLPGPCYRQQRLSKNIDSNNNSNFAWTGATKYHLNGRNSLTNPGVAMATNKDDEDQFLPINGVLVFGKTGAANKTTLENVLMTSEEEIKTTNPVATEEYGVVSSNLQSSTAGPRTQTVNSQGALPGMVWQNRDVYLQGPIWAEIPHTDGNFHPSPLMGGFGLKHPPPQILIKNTPVPANPPEVFTPAKFASFITQYSTGQVSVEIEWELQKENSKRWNPEIQYTSNYAKSNNVEFAVNNEGVYTEPRPIGTRYLTRNL

SEQ ID NO: 144 - DNA, 3102 bp, Adeno-associated virus
gcggccgcgaattcgcccttcgcagagaccaaagttcaactgaaacgaatcaaccggtttattgattaacaagtaattacaggttacgggtgaggtaacgggtgccaatggggcgaggctcagtataaaccccttcgttgttgacagcaaattccacattattagacttggcataatttgaggtgtactgaatctctggattccagcgtttgctgttttctttctgcagttcccactcgatctccacgctgacctggccggtgctgtactgcgtgataaatgaggcaaacttggcaggagtaaacacctctggaggattagcaggtaccggggtgtttttgatgagaatttgaggaggcgggtgtttgagtccaaatccgcccatcaggggagacgggtgaaagttgccgtccgtgtgaggaatttcggcccagatgggaccctgcaggtacacgtcccggttctgccagaccatgccgggcagagccccctggctgttgacagtctgtgtccggggtccggccgtagacgattgcaggttgctggagaccacaccgtattcttctgtagccacgggattggtggttttgatctcctcctcgctggtcattagcacgttttccagcgttgtcttgttggcagcccccgttttgccaaaaaccagcactccgttgatgggaaggaactggtcctcgtcgtccttgttggtggccatggctacgcccgggttggttaatgaatttctaccattcagatggtatttagtggccccggtccaggcaaagttactgttgttgttgctgtctatgttttttgacagtctctgctgccgataacagggtccgggcagccagttctttgattgctcggccacggtgttgggcccagcctgatggaactgcagctcccttgtggaccccgtagtgctctgggtccgggccaggtagtacaggtactggtcgatgaggggattcatcagccggtccaggctctggctgtgcgcatagctgctgtggaaaggcacttcctcaaaggtgtagctgaattcaaagttattgcccgttctcagcatctgagaaggaaagtactccaggcagcagaaggaggaacgtcccacagactgactgccgttgtttagagtcagatatccgtactgaggaatcatgaacacgtccgcagggaacggagggaggcagccctggtgcgcagagccgaggacgtacggcagttggtactccgagtccgagaagacctgaatcgtgctggtaaggttattagcgatggtcgtaacgccgtcgttcgtcgtgacctccttgacctggatgttgaacaacttgaaccgcagctttctgggccggaatccccagttgttgttgatgagtcgctgccagtcacgtggtgagaagtggcagtggaatctgttgaagtcaaaatagccccagggggtgctgtagccgaagaagtggttgtcgttggtagccccgctctgacttgatatctgcttgtagaggtggttgttgtaggtgggcagggcccaggtgcgggtgctggtggtgatgactctgtcgcccagccatgtggaatcgcaatgccaatttccggaggcattacccactccgtcggcgccttcgttattgtctgccattggtgcgccaccgcctgcagccattgtaccagatcccagacctgagggcgcggcgggaggttctccgagaggttgggggtcgggcactgactctgagtcgccagtctgcccaaagttgagcttctttttagcgggctgctggcctttcttgccgatgcccgtggaggagtcgggggattctatgggtctcttctttccggaagccgtcttagcgccttcctcaaccagaccgagaggttcgagaacccgcttcttggcctggaagactgctcgcccgaggttgcccccaaaagacgtatcttcttgaagacgctcctgaaactcggcgtcggcgtggttgtacttgaggtacgggttgtccccctgctcgagctgcttgtcgtaggccttgtcgtgctcgagggccgcggcgtctgcctcgttgaccggctctcccttgtcgagtccgttgaagggtccgaggtacttgtagccaggaagcaccagaccccggccgtcgtcctgcttttgctggttggctttgggtttcggggctccaggtttcaagtcccaccactcgcgaatgccctcagagaggttgtcctcgagccaatctggaagataaccatcggcagccatacctggtttaagtcatttattgctcagaaacacagtcatccaggtccacgttgaccagatcgcaggccgagcaagcaatctcgggagcccgccccagcagatgatgaatggcacagagtttccgatacgtcctctttctgacgaccggttgagattctgacacgccggggaaacattctgaacagtctctggtcccgtgcgtgaagcaaatgttgaaattctgattcattctctcgcatgtcttgcagggaaacagcatctgaagcatgcccgcgtgacgagaacatttgttttggtacctgtcggcaaagtccaccggagctccttccgcgtctgacgtcgatggatccgcgactgaggggcaagcccgcttgggctcgcttttatccgcgtcatcgggggcgggtctcttgttggctccaccctttctgacgtagaactcatgcgccacctcggtcacgtgatcctgcgcccagcggaagaactctttgacttcctgctttgtcaccttgccaaagtcatgctccagacggcgggtgagttcaaatttgaacatccggtcttgtaacggctgctggtgctcgaaggtggtgctgttcccgtcaatcacggcgcacatgttggtgttggaagtgacgatcacgggggtgggatcgatctgggcggacgacttgcacttttggtccacgcgcaccttgctgccgccgagaatggccttggcggactccacgaccttggccgtcatcttgccctcctcccaccagatcaccatcttgtcgacgcaatcgttgaagggaaagttctcattggtccagttgacgcagccgaagggcgaattc

SEQ ID NO: 145 - protein, 728 aa, Adeno-associated virus
MAADGYLPDWLEDNLSEGIREWWDLKPGAPKPKANQQKQDDGRGLVLPGYRYLGPFNGLDKGEPVNEADAAALEHDKAYDKQLEQGDNPYLKYNHADAEFQERLQEDTSFGGNLGRAVFQAKKRVLEPLGLVEEGAKTAPGKKRPIESPDSSTGIGKNGQPPAKKKLNFGQTGDSESVPDPQPLGEPPAAPSGLGSGTMAAGGGAPMADNNEGADGVGNASGNWHCDSTWLGDRVITTSTRTWALPTYNNHLYKQISSQSGATNDNHFFGYSTPWGYFDFNRFHCHFSPRDWQRLINNNWGFRPRKLRFKLFNIQVKEVTTNDGVTTIANNLTSTIQVFSDSEYQLPYVLGSAHQGCLPPFPADVFMIPQYGYLTLNNGSQSVGRSSFYCLEYFPSQMLRTGNNFEFSYTFEEVPFHSSYAHSQSLDRLMNPLIDQYLYYLARTQSTTGSTRELQFHQAGPNTMAEQSKNWLPGPCYRQQRLSKNIDSNNNSNFAWTGATKYHLNGRNSLTNPGVAMATNKDDEDQFFPINGVLVFGKTGAANKTTLENVLMTSEEEIKTTNPVATEEYGVVSSNLQSSTAGPQTQTVNSQGALPGMVWQNRDVYLQGPIWAKIPHTDGNFHPSPLMGGFGLKHPPPQILIKNTPVPANPPEVFTPAKFASFITQYSTGQVSVEIEWELQKENSKRWNPEIQYTSNYAKSNNVEFAVNNEGVYTEPRPIGTRYLTRNL

SEQ ID NO: 146 - protein, 728 aa, Adeno-associated virus
MAADGYLPDWLEGNLSEGIREWWDLKPGAPKPKANQQKQDDGRGLVLPGYRYLGPFNGLDKGEPVNEADAAALEHDKAYDKQLEQGDNPYLKYNHADAEFQERLQEDTSFGGNLGRAVFQAKKRVLEPLGLVEEGAKTAPGKKRPIESPDSSTGIGKNGQPPAKKKLNFGQTGDSESVPDPQPLGEPPAAPSGLGSGTMAAGGGAPMADNNEGADGVGNASGNWHCDSTWLGDRVITTSTRTWALPTYNNHLYKQISSQSGATNDNHFFGYSTPWGYFDFNRFHCHFSPRDWQRLINNNWGFRPRKLRFKLFNIQVKEVTTNDGVTTIANNLTSTIQVFSDSEYQLPYVLGSAHQGCLPPFPADVFMIPQYGYLTLNNGSQSVGRSSFYCLEYFPSQMLRTGDNFEFSYTFEEVPFHSSYAHSQSLDRLMNPLIDQYLYYLARTQSTTGSTRELQFHQAGPNTMAEQSKNWLPGPCYRQQRLSKNIDSNNNSNFAWTGATKYHLNGRNSLTNPGVAMATNKDDEDQFFPINGVLVFGKTGAANKTTLENVLMTSEEEIKTTNPVATEEYGVVSSNLQSSTAGPQTQTVNSQGALPGMVWQNRDVYLQGPIWAKIPHTDGNFHPSPLMGGFGLKHPPPQILIKNTPVPANPPEVFTPAKFASFITQYSTGQVSVEIEWELQKENSKRWNPEIQYTSNYAKSNNVEFAVNNEGVYTEPRPIGTRYLTRNL

SEQ ID NO: 147 - DNA, 3106 bp, Adeno-associated virus
gcggccgcgaattcgcccttcgcagagaccaaagttcaactgaaacgaatcagccggtttattgattaacaagtaattacaggttacgggtgaggtaacgggtgccaatggggcgaggctcagtataaaccccttcgttgttgacagcaaattccacattattagacttggcataatttgaggtgtactgaatctctggattccagcgtttgctgttttctttctgcagttcccactcgatctccacgctgacctggccggtgctgtactgcgtgataaatgaggcaaacttggcaggagtaaacacctctggaggattagcaggtaccggggtgtttttgatgagaatttgaggaggcgggtgtttgagtccaaatccgcccatcaggggagacgggtgaaagttgccgtccgtgtgaggaattttggcccagatgggaccctgcaggtacacgtcccggttctgccagaccatgccgggcagagccccctggctgttgacagtctgtgtctggggtccggccgtagacgattgcaggttgctggagaccacaccgtattcttctgtagccacgggattggtggttttgatctcctcctcgctggtcattagcacgttttccagcgttgtcttgttggcagcccccgttttgccaaaaaccagcactccgttgatgggaaagaactggtcctcgtcgtccttgttggtggccatggctacgcccgggttggttaatgaatttctaccattcagatggtatttagtggccccggtccaggcaaagttactgttgttgttgctgtctatgttttttgacagtctctgctgccgataacagggtccgggcagccagttctttgattgctcggccatggtgttgggcccagcctgatggaactgcagctcccttgtggaccccgtagtgctctgggtccgggccaggtagtacaggtactggtcgatgaggggattcatcagccggtccaggctctggctgtgcgcatagctgctgtggaaaggcacttcctcaaaggtgtagctgaattcaaagttatcgcccgttctcagcatctgagaaggaaagtactccaggcagtagaaggaggaacgtcccacagactgactgccgttgtttagagtcagatatccgtactgaggaatcatgaacacgtccgcagggaacggagggaggcagccctggtgcgcagagccgaggacgtacggcagttggtactccgagtccgagaagacctgaatcgtgctggtaaggttattagcgatggtcgtaacgccgtcgttcgtcgtgacctccttgacctggatgttgaacaacttgaaccgcagctttctgggccggaatccccagttgttgttgatgagtcgctgccagtcacgtggtgagaagtggcagtggaatctgttgaagtcaaaatagccccagggggtgctgtagccgaagaagtggttgtcgttggtagccccgctctgacttgatatctgcttgtagaggtggttgttgtaggtgggcagggcccaggtgcgggtgctggtggtgatgactctgtcgcccagccatgtggaatcgcaatgccaatttccggaggcattacccactccgtcggcgccttcgttattgtctgccattggtgcgccaccgcctgcagccattgtaccagatcccagacctgagggcgcggcgggaggttctccgagaggttgggggtcgggcactgactctgagtcgccagtctgcccaaagttgagcttctttttagcgggcggctggccgttcttgccgatgcccgtggaggagtcgggggattctatgggtctcttctttccaggagccgtcttagcgccttcctcaaccagaccgagaggttcgagaacccgcttcttggcctggaagactgctcgcccgaggttgcccccaaaagacgtatcttcttgaagacgctcctgaaactcggcgtcggcgtggttgtacttgaggtacgggttgtccccctgctcgagctgcttgtcgtaggccttgtcgtgctcgagggccgcggcgtctgcctcgttgaccggctctcccttgtcgagtccgttgaagggtccgaggtacctgtagccaggaagcaccagaccccggccgtcgtcctgcttttgctggttggctttgggtttcggggctccaggtttcaagtcccaccactcgcgaatgccctcagagaggttgccctcgagccaatctggaagataaccatcggcagccatacctggtttaagtcatttattgctcagaaacacagtcatccaggtccacgttggccagatcgcaggccgagcaagcaatctcgggagcccgccccagcagatgatgaatggcacagagtttccgatacgtcctctttctgacgaccggttgagattctgacacgccggggaaacattctgaacagtctctggtcccgtgcgtgaagcaaatgttgaaattctgattcattctctcgcatgtcttgcaggggaacagcatctgaagcatgcccgcgtgacgagaacatttgttttggtacctgtcggcaaagtccaccggagctccttccgcgtctgacgtcgatggatccgcgactgaggggcaggcccgcttgggctcgcttttatccgcgtcatcgggggcgggtctcttgttggctccaccctttctgacgtagaactcatacgccacctcggtcacgtgatcctgcgcccagcggaagaactctttgacttcctgctttgtcaccttgccaaagtcatgctccagacggcgggtgagttcaaatttgaacatccggtcttgtaacggctgctggtgctcgaaggtggtgctgttcccgtcaatcacggcgcacatgttggtgttggaagtgacgatcacgggggtgggatcgatctgggcggacgacttgcacttttggtccacgcgcaccttgctgccgccgagaatggccttggcggactccacgaccttggccgtcatcctgccctcctcccaccagatcaccatcttgtcgacgcaatcgttgaagggaaagttctcattggtccagttgacgcagccgtagaaagggcgaattc

SEQ ID NO: 148 - protein, 728 aa, Adeno-associated virus
MAADGYLPDWLEDNLSEGIREWWDLKPGAPKPKANQQKQDDGRGLVLPGYKYLGPFNGLDKGEPVNEADAAALEHDKAYDKQLEQGDNPYLKYNHADAEFQERLQEDTSFGGNLGRAVFQAKKRVLEPLGLVEEGAKTAPGKKRPIESPDSSTGIGKKGQQPAKKKLNFGQTGDSESVPDPQPLGEPPAAPSGLGSGTMAAGGGAPMADNNEGADGVGNASGNWHCDSTWLGDRVITTSTRTWALPTYNNHLYKQISSQSGATNDNHFFGYSTPWGYFDFNRFHCHFSPRDWQRLINNNWGFRPRKLRFKLFNIQVKEVTTNDGVTTIANNLTSTIQVFSDSEYQLPYVLGSAHQGCLPPFPADVFMIPQYGYLTLNNGSQSMGRSSFYCLEYFPSQMLRTGNNFEFSYTFEEVPFHSSYAHSQSLDRLMNPLIDQYLYYLARTQSTTGSTRELQFHQAGPNTMAEQSKNWLPGPCYRQQRLSKNIDSNNNSNFAWTGATKYHLNGRNSLTNPGVAMATNKDDEGQFFPINGVLVFGKTGAANKTTLENVLMTSEEEIKTTNPVATEEYGVVSSNLQSSTAGPQTQTVNSQGALPGMVWQNRDVYLQGPIWAKIPHTDGNFHPSPLMGGFGLKHPPPQILIKNTPVPANPPGVFTPALFASFITQYSTGQVSVEIEWELQKENSKRWNPEIQYTSNYAKSNNVEFAVNNEGVYTEPRPIGTRYLTRNL

SEQ ID NO: 149 - DNA, 3098 bp, Adeno-associated virus
gaattcgcccttcgcagagaccaaagttcaactgaaacgaatcaaccggtttattgattaacaagtaattacaggttacgggtgaggtaacgggtgccaatggggcgaggctcagtataaaccccttcgttgttgacagcaaattccacattattagacttggcataatttgaggtgtactgaatctctggattccagcgtttgctgttttctttctgcagttcccactcgatctccacgctgacctggccggtgctgtactgcgtgataaatgaggcaaactaggcaggagtaaacacccctggaggattagcaggtaccggggtgtttttgatgagaatttgaggaggcgggtgtttgagtccaaatccgcccatcaggggagacgggtgaaagttgccgtccgtgtgaggaattttggcccagatgggaccctgcaggtacacgtcccggttctgccagaccatgccgggcagagccccctggctgttgacagtctgtgtctggggtccggccgtagacgattgcaggttgctggagaccacaccgtattcttctgtagccacgggattggtggttttgatctcctcctcgctggtcattagcacgttttccagcgttgtcttgttggcagcccccgttttgccaaaaaccagcactccgttgatgggaaagaactggccctcgtcgtccttgttggtggccatggctacgcccgggttggttaatgaatttctaccattcagatggtatttagtggccccggtccaggcaaagttactgttgttgttgctgtctatgttttttgacagtctctgctgccgataacagggtccgggcagccagttctttgattgctcggccatggtgttgggcccagcctgatggaactgcagctcccttgtggaccccgtagtgctctgggtccgggccaggtagtacaggtactggtcgatgaggggattcatcagccggtccaggctctggctgtgcgcatagctgctgtggaaaggcacttcctcaaaggtgtagctgaattcaaagttattgcccgttctcagcatctgagaaggaaagtactccaggcagtagaaggaggaacgtcccatagactgactgccgttgtttagagtcagatatccgtactgaggaatcatgaacacgtccgcagggaacggagggaggcagccctggtgcgcagagccgaggacgtacggcagttggtactccgagtccgagaagacctgaatcgtgctggtaaggttattagcgatggtcgtaacgccgtcgttcgtcgtgacctccttgacctggatgttgaacaacttgaaccgcagctttctgggccggaatccccagttgttgttgatgagtcgctgccagtcacgtggtgagaagtggcagtggaatctgttgaagtcaaaatagccccagggggtgctgtagccgaagaagtggttgtcgttggtagccccgctctgacttgatatctgcttgtagaggtggttgttgtaggtgggcagggcccaggtgcgggtgctggtggtgatgactctgtcgcccagccatgtggaatcgcaatgccaatttccggaggcattacccactccgtcggcgccttcgttattgtctgccattggtgcgccaccgcctgcagccattgtaccagatcccagacctgagggcgcggcgggaggttctccgagaggttgggggtcgggcactgactctgagtcgccagtctgcccaaagttgagcttctttttagcgggctgctggcctttcttgccgatgcccgtggaggagtcgggggattctatgggtctcttctttccaggagccgtcttagcgccttcctcaaccagaccgagaggttcgagaacccgcttcttggcctggaagactgctcgcccgaggttgcccccaaaagacgtatcttcttgaagacgctcctgaaactcagcgtcggcgtggttgtacttgaggtacgggttgtccccctgctcgagctgcttgtcgtaggccttgtcgtgctcgagggccgcggcgtctgcctcgttgaccggctctcccttgtcgagtccgttgaagggtccgaggtacttgtagccaggaagcaccagaccccggccgtcgtcctgcttttgctggttggctttgggtttcggggctccaggtttcaagtcccaccactcgcgaatgccctcagagaggttgtcctcgagccaatctggaagataaccatcggcagccatacctggtttaagtcatttattgctcagaaacacagtcatccaggtccacgttgaccagatcgcaggccgagcaagcaatctcgggagcccgccccagcagatgatgaatggcacagagtttccgatacgtcctctttctgacgaccggttgagattctgacacgccggggaaacattctgaacagtctctggtcccgtgcgtgaagcaaatgttgaaattctgattcattctctcgcatgtcttgcagggaaacagcatctgaagcatgcccgcgtgacgagaacatttgttttggtacctgtcggcaaagtccaccggagctccttccgcgtctgacgtcgatggatccgcgactgaggggcaggcccgcttgggctcgcttttatccgcgtcatcgggggcgggcctcttgttggctccaccctttctgacgtagaactcatgcgccacctcggtcacgtgatcctgcgcccagcggaagaactctttgacttcctgctttgtcaccttgccaaagtcctgctccagacggcgggtgagttcaaatttgaacatccggtcttgtaacggctgctggtgctcgaaggtggtgctgttcccgtcaatcacggcgcacatgttggtgttggaagtgacgatcacgggggtgggatcgatctgggcggacgacttgcacttttggtccacgcgcaccttgctgccgccgagaatggccttggcggactccacgaccttggccgtcatcttgccctcctcccaccagatcaccatcttgtcgacgcaatcgttgaagggaaagttctcattggtccagttgacgcagccgtagaaagggcgaattc

SEQ ID NO: 150 - DNA, 2187 bp, Adeno-associated virus
atggctgccgatggttatcttccagattggctcgagggcaacctctctgagggcattcgcgagtggtgggacttgaaacctggagccccgaaacccaaagccaaccagcaaaagcaggacgacggccggggtctggtgcttcctggctacaggtacctcggacccttcaacggactcgacaagggagagccggtcaacgaggcagacgccgcggccctcgagcacgacaaggcctacgacaagcagctcgagcagggggacaacccgtacctcaagtacaaccacgccgacgccgagtttcaggagcgtcttcaagaagatacgtcttttgggggcaacctcgggcgagcagtcttccaggccaagaagcgggttctcgaacctctcggtctggttgaggaaggcgctaagacggctcctggaaagaagagacccatagaatcccccgactcctccacgggcatcggcaagaacggccagccgcccgctaaaaagaagctcaactttgggcagactggcgactcagagtcagtgcccgacccccaacctctcggagaacctcccgccgcgccctcaggtctgggatctggtacaatggctgcaggcggtggcgcaccaatggcagacaataacgaaggcgccgacggagtgggtaatgcctccggaaattggcattgcgattccacatggctgggcgacagagtcatcaccaccagcacccgcacctgggccctgcccacctacaacaaccacctctacaagcagatatcaagtcagagcggggctaccaacgacaaccacttcttcggctacagcaccccctggggctattttgacttcaacagattccactgccacttctcaccacgtgactggcagcgactcatcaacaacaactggggattccggcccagaaagctgcggttcaagttgttcaacatccaggtcaaggaggtcacgacgaacgacggcgttacgaccatcgctaataaccttaccagcacgattcaggtcttctcggactcggagtaccaactgccgtacgtcctcggctctgcgcaccagggctgcctccctccgttccctgcggacgtgttcatgattcctcagtacggatatctgactctaaacaacggcagtcagtctgtgggacgttcctccttctactgcctggagtactttccttctcagatgctgagaacgggcgataactttgaattcagctacacctttgaggaagtgcctttccacagcagctatgcgcacagccagagcctggaccggctgatgaatcccctcatcgaccagtacctgtactacctggcccggacccagagcactacggggtccacaagggagctgcagttccatcaggctgggcccaacaccatggccgagcaatcaaagaactggctgcccggaccctgttatcggcagcagagactgtcaaaaaacatagacagcaacaacaacagtaactttgcctggaccggggccactaaataccatctgaatggtagaaattcattaaccaacccgggcgtagccatggccaccaacaaggacgacgaggaccagttctttcccatcaacggagtgctggtttttggcaaaacgggggctgccaacaagacaacgctggaaaacgtgctaatgaccagcgaggaggagatcaaaaccaccaatcccgtggctacagaagaatacggtgtggtctccagcaacctgcaatcgtctacggccggaccccagacacagactgtcaacagccagggggctctgcccggcatggtctggcagaaccgggacgtgtacctgcagggtcccatctgggccaaaattcctcacacggacggcaactttcacccgtctcccctgatgggcggatttggactcaaacacccgcctcctcaaattctcatcaaaaacaccccggtacctgctaatcctccagaggtgtttactcctgccaagtttgcctcatttatcacgcagtacagcaccggccaggtcagcgtggagatcgagtgggaactgcagaaagaaaacagcaaacgctggaatccagagattcagtacacctcaaattatgccaagtctaataatgtggaatttgctgtcaacaacgaaggggtttatactgagcctcgccccattggcacccgttacctcacccgtaacctgtaa

SEQ ID NO: 151 - protein, 728 aa, Adeno-associated virus; identical to SEQ ID NO: 146

SEQ ID NO: 152 - protein, 728 aa, Adeno-associated virus
MAADGYLPDWLEDNLSEGIREWWDLKPGAPKPKANQQKQDDGRGLVLPGYRYLGPFNGLDKGEPVNEADAAALEHDKAYDKQLEQGDNPYLKYNHADAEFQERLQEDTSFGGNLGRAVFQAKKRVLEPLGLVEEGAKTAPGKKRPIESPDSSTGIGKNGQPPAKKKLNFGQTGDSESVPDPQPLGEPPAAPSGLGSGTMAAGGGAPMADNNEGADGVGNASGNWHCDSTWLGDRVITTSTRTWALPTYNNHLYKQISSQSGATNDNHFFGYSTPWGYFDFNRFHCHFSPRDWQRLINNNWGFRPRKLRFKLFNIQVKEVTTNDGVTTIANNLTSTIQVFSDSEYQLPYVLGSAHQGCLPPFPADVFMIPQYGYLTLNNGSQSVGRSSFYCLEYFPSQMLRTGDNFEFSYTFEEVPFHSSYAHSQSLDRLMNPLIDQYLYYLARTQSTTGSTRELQFHQAGPNTMAEQSKNWLPGPCYRQQRLSKNIDSNNNSNFAWTGATKYHLNGRNSLTNPGVAMATNKDDEDQFFPINGVLVFGKTGAANKTTLENVLMTSEEEIKTTNPVATEEYGVVSSNLQSSTAGPQTQTVNSQGALPGMVWQNRDVYLQGPIWAKIPHTDGNFHPSPLMGGFGLKHPPPQILIKNTPVPANPPEVFTPAKFASFITQYSTGQVSVEIEWELQKENSKRWNPEIQYTSNYAKSNNVEFAVNNEGVYTEPRPIGTRYLTRNL

SEQ ID NO: 153 - protein, 728 aa, Adeno-associated virus; identical to SEQ ID NO: 145

SEQ ID NO: 154 - protein, 728 aa, Adeno-associated virus
MAADGYLPDWLEDNLSEGIREWWDLKPGAPKPKANQQKQDDGRGLVLPGYKYLGPFNGLDKGEPVNEADAAALEHDKAYDKQLEQGDNPYLKYNHADAEFQERLQEDTSFGGNLGRAVFQAKKRVLEPLGLVEEGAKTAPGKKRPIESPDSSTGIGKNGQPPAKKKLNFGQTGDSESVPDPQPLGEPPAAPSGLGSGTMAAGGGAPMADNNEGADGVGNASGNWHCDSTWLGDRVITTSTRTWALPTYNNHLYKQISSQSGATNDNHFFGYSTPWGYFDFNRFHCHFSPRDWQRLINNNWGFRPRKLRFKLFNIQVKEVTTNDGVTTIANNLTSTIQVFSDSEYQLPYVLGSAHQGCLPPFPADVFMIPQYGYLTLNNGSQSVGRSSFYCLEYFPSQMLRTGNNFEFSYTFEEVPFHSSYAHSQSLDRLMNPLIDQYLYYLARTQSTTGSTRELQFHQAGPNTMAEQSKNWLPGPCYRQQRLSKNIDSNNNSNFAWTGATKYHLNGRNSLTNPGVAMATNKDDEDQFFPINGVLVFGKTGAANKTTLENVLMTSEEEIKTTNPVATEEYGVVSSNLQSSTAGPQTQTVNSQGALPGMVWQNRDVYLQGPIWAKIPHTDGNFHPSPLMGGFGLKHPPPQILIKNTPVPANPPEVFTPAKFASFITQYSTGQVSVEIEWELQKENSKRWNPEIQYTSNYAKSNNVEFAVNNEGVYTEPRPIGTRYLTRNL

SEQ ID NO: 155 - protein, 728 aa, Adeno-associated virus
MAADGYLPDWLEDNLSEGIREWWDLKPGAPKPKANQQKQDDGRGLVLPGYKYLGPFNGLDKGEPVNEADAAALEHDKAYDKQLEQGDNPYLKYNHADAEFQERLQEDTSFGGNLGRAVFQAKKRVLEPLGLVEEGAKTAPGKKRPIESPDSSTGIGKKGQQPAKKKLNFGQTGDSESVPDPQPLGEPPAAPSGLGSGTMAAGGGAPMADNNEGADGVGNASGNWHCDSTWLGDRVITTSTRTWALPTYNNHLYKQISSQSGATNDNHFFGYSTPWGYFDFNRFHCHFSPRDWQRLINNNWGFRPRKLRFKLFNIQVKEVTTNDGVTTIANNLTSTIQVFSDSEYQLPYVLGSAHQGCLPPFPADVFMIPQYGYLTLNNGSQSVGRSSFYCLEYFPSQMLRTGNNFEFSYTFEEVPFHSSYAHSQSLDRLMNPLIDQYLYYLARTQSTTGSTRELQFHQAGPNTMAEQSKNWLPGPCYRQQRLSKNIDSNNNSNFAWTGATKYHLNGRNSLTNPGVAMATNKDDEDQFFPINGVLVFGKTGAANKTTLENVLMTSEEEIKTTNPVATEEYGVVSSNLQSSTAGPQTQTVNSQGALPGMVWQNRDVYLQGPIWAKIPHTDGNFHPSPLMGGFGLKHPPPQILIKNTPVPANPPEVFTPAKFASFITQYSTGQVSVEIEWELQKENSKRWNPEIQYTSNYAKSNNVEFAVNNEGVYTEPRPIGTRYLTRNL

SEQ ID NO: 156 - DNA, 2215 bp, Artificial Sequence
  Description of Artificial Sequence: Synthetic polynucleotide
atggctgccgatggttatcttccagattggctcgaggacactctctctgaaggaataagacagtggtggaagctcaaacctggcccaccaccaccaaagcccgcagagcggcataaggacgacagcaggggtcttgtgcttcctgggtacaagtacctcggacccttcaacggactcgacaagggagagccggtcaacgaggcagacgccgcggccctcgagcacgacaaagcctacgaccggcagctcgacagcggagacaacccgtacctcaagtacaaccacgccgacgccgagttccaggagcggctcaaagaagatacgtcttttgggggcaacctcgggcgagcagtcttccaggccaaaaagaggcttcttgaacctcttggtctggttgaggaagcggctaagacggctcctggaaagaagaggcctgtagagcactctcctgtggagccagactcctcctcgggaaccggaaaggcgggccagcagcctgcaagaaaaagattgaattttggtcagactggagacgcagactcagtcccagaccctcaaccaatcggagaacctcccgcagccccctcaggtgtgggatctcttacaatggctgcaggcggtggcgcaccaatggcagacaataacgagggcgccgacggagtgggtaattcctcgggaaattggcattgcgattccacatggatgggcgacagagtcatcaccaccagcacccgaacctgggccctgcccacctacaacaaccacctctacaagcaaatctccaacagcacatctggaggatcttcaaatgacaacgcctacttcggctacagcaccccctgggggtattttgactttaacagattccactgccacttttcaccacgtgactggcagcgactcatcaacaacaactggggattccggcccaagagactcagcttcaagctcttcaacatccaggtcaaggaggtcacgcagaatgaaggcaccaagaccatcgccaataacctcaccagcaccatccaggtgtttacggactcggagtaccagctgccgtacgttctcggctctgcccaccagggctgcctgcctccgttcccggcggacgtgttcatgattccccagtacggctacctaacactcaacaacggtagtcaggccgtgggacgctcctccttctactgcctggaatactttccttcgcagatgctgagaaccggcaacaacttccagtttacttacaccttcgaggacgtgcctttccacagcagctacgcccacagccagagcttggaccggctgatgaatcctctgattgaccagtacctgtactacttgtctcggactcaaacaacaggaggcacgacaaatacgcagactctgggcttcagccaaggtgggcctaatacaatggccaatcaggcaaagaactggctgccaggaccctgttaccgccagcagcgagtatcaaagacatctgcggataacaacaacagtgaatactcgtggactggagctaccaagtaccacctcaatggcagagactctctggtgaatccgggcccggccatggcaagccacaaggacgatgaagaaaagtttttttcctcagagcggggttctcatctttgggaagcaaggctcagagaaaacaaatgtggacattgaaaaggtcatgattacagacgaagaggaaatcaggacaaccaatcccgtggctacggagcagtatggttctgtatctaccaacctccagagaggcaacagacaagcagctaccgcagatgtcaacacacaaggcgttcttccaggcatggtctggcaggacagagatgtgtaccttcaggggcccatctgggcaaagattccacacacggacggacattttcacccctctcccctcatgggtggattcggacttaaacaccctccgcctcagatcctgatcaagaacacgcctgtacctgcggatcctccgaccaccttcaaccagtcaaagctgaactctttcatcacccagtattctactggccaagtcagcgtggagatcgagtgggagctgcagaaggaaaacagcaagcgctggaaccccgagatccagtacacctccaactactacaaatctacaagtgtggactttgctgttaatacagaaggcgtgtactctgaaccccgccccattggcacccgttacctcacccgtaatctgtaa

SEQ ID NO: 157 - protein, 737 aa, Artificial Sequence
  Description of Artificial Sequence: Synthetic polypeptide
MAADGYLPDWLEDTLSEGIRQWWKLKPGPPPPKPAERHKDDSRGLVLPGYKYLGPFNGLDKGEPVNEADAAALEHDKAYDRQLDSGDNPYLKYNHADAEFQERLKEDTSFGGNLGRAVFQAKKRLLEPLGLVEEAAKTAPGKKRPVEHSPVEPDSSSGTGKAGQQPARKRLNFGQTGDADSVPDPQPIGEPPAAPSGVGSLTMAAGGGAPMADNNEGADGVGNSSGNWHCDSTWMGDRVITTSTRTWALPTYNNHLYKQISNSTSGGSSNDNAYFGYSTPWGYFDFNRFHCHFSPRDWQRLINNNWGFRPKRLSFKLFNIQVKEVTQNEGTKTIANNLTSTIQVFTDSEYQLPYVLGSAHQGCLPPFPADVFMIPQYGYLTLNNGSQAVGRSSFYCLEYFPSQMLKTGNNFQFTYTFEDVPFHSSYAHSQSLDRLMNPLIDQYLYYLSRTQTTGGTTNTQTLGFSQGGPNTMANQAKNWLPGPCYRQQRVSKTSADNNNSEYSWTGATKYHLNGRDSLVNPGPAMASHKDDEEKFFPQSGVLIFGKQGSEKTNVDIEKVMITDEEEIRTTNPVATEQYGSVSTNLQRGNRQAATADVNTQGVLPGMVWQDRDVYLQGPIWAKIPHTDGHFHPSPLMGGFGLKHPPPQILIKNTPVPADPPTTFNQSKLNSFITQYSTGQVSVEIEWELQKENSKRWNPEIQYTSNYYKSTSVDFAVNTEGVYSEPRPIGTRYLTRNL

SEQ ID NO: 158 - protein, 737 aa, Artificial Sequence
  Description of Artificial Sequence: Synthetic polypeptide
MAADGYLPDWLEDTLSEGIRQWWKLKPGPPPPKPAERHKDDSRGLVLPGYKYLGPFNGLDKGEPVNEADAAALEHDKAYDRQLDSGDNPYLKYNHADAEFQERLKEDTSFGGNLGRAVFQAKKRLLEPLGLVEEAAKTAPGKKRPVEHSPVEPDSSSGTGKAGQQPARKRLNFGQTGDADSVPDPQPIGEPPAAPSGVGSLTMAAGGGAPMADNNEGADGVGNSSGNWHCDSTWMGDRVITTSTRTWALPTYNNHLYKQISNSTSGGSSNDNAYFGYSTPWGYFDFNRFHCHFSPRDWQRLINNNWGFRPKRLSFKLFNIQVKEVTQNEGTKTIANNLTSTIQVFTDSEYQLPYVLGSAHQGCLPPFPADVFMIPQYGYLTLNNGSQAVGRSSFYCLEYFPSQMLKTGNNFQFTYTFEDVPFHSSYAHSQSLDRLMNPLIDQYLYYLSRTQTTGGTTNTQTLGFSQGGPNTMANQAKNWLPGPCYRQQRVSKTSADNNNSEYSWTGATKYHLNGRDSLVNPGPAMASHKDDEEKFFPQSGVLIFGKQGSEKTNVDIEKVMITDEEEIRTTNPVATEQYGSVSTNLQQGNTQAATADVNTQGVLPGMVWQDRDVYLQGPIWAKIPHTDGHFHPSPLMGGFGLKHPPPQILIKNTPVPADPPTTFNQSKLNSFITQYSTGQVSVEIEWELQKENSKRWNPEIQYTSNYYKSTSVDFAVNTEGVYSEPRPIGTRYLTRNL

SEQ ID NO: 159 - protein, 737 aa, Artificial Sequence
  Description of Artificial Sequence: Synthetic polypeptide
MAADGYLPDWLEDTLSEGIRQWWKLKPGPPPPKPAERHKDDSRGLVLPGYKYLGPFNGLDKGEPVNEADAAALEHDKAYDRQLDSGDNPYLKYNHADAEFQERLKEDTSFGGNLGRAVFQAKKRLLEPLGLVEEAAKTAPGKKRPVEHSPVEPDSSSGTGKAGQQPARKRLNFGQTGDADSVPDPQPIGEPPAAPSGVGSLTMAAGGGAPMADNNEGADGVGNSSGNWHCDSTWMGDRVITTSTRTWALPTYNNHLYKQISNSTSGGSSNDNAYFGYSTPWGYFDFNRFHCHFSPRDWQRLINNNWGFRPKRLSFKLFNIQVKEVTQNEGTKTIANNLTSTIQVFTDSEYQLPYVLGSAHQGCLPPFPADVFMIPQYGYLTLNNGSQAVGRSSFYCLEYFPSQMLRTGNNFQFTYTFEDVPFHSSYAHSQSLDRLMNPLIDQYLYYLSRTQTTGGTTNTQTLGFSQGGPNTMANQAKNWLPGPCYRQQRVSKTSADNNNSEYSWTGATKYHLNGRDSLVNPGPAMASHKDDEEKFFPQSGVLIFGKQGSEKTNVDIEKVMITDEEEIRTTNPVATEQYGSVSTNLQQGNTQAATADVNTQGVLPGMVWQDRDVYLQGPIWAKIPHTDGHFHPSPLMGGFGLKHPPPQILIKNTPVPADPPTTFNQSKLNSFITQYSTGQVSVEIEWELQKENSKRWNPEIQYTSNYYKSTSVDFAVNTEGVYSEPRPIGTRYLTRNL

SEQ ID NO: 160 - protein, 729 aa, Adeno-associated virus
MAADGYLPDWLEDNLSEGIREWWDLKPGAPKPKANQQKQDDGRGLVLPGYKYLGPFNGLDKGEPVNAADAAALEHDKAYDQQLKAGDNPYLRYNHADAEFQERLQEDTSFGGNLGRAVFQAKKRVLEPLGLVEEGAKTAPGKKRPIDSPDSSTGIGKKGQQPAKKKLNFGQTGDSESVPDPQPLGEPPAAPSSVGSGTMAAGGGAPTADNNEGADGVGNASGNWHCDSTWLGDRVITTSTRTWALPTYNNHLYKQISSSSSGATNDNHYFGYSTPWGYFDFNRFHCHFSPRDWQRLINNNWGFRPKKLRFKLFNIQVKEVTTNDGVTTIANNLTSTVQVFSDSEYQLPYVLGSAHQGCLPPFPADVFMIPQYGYLTLNNGSQSVGRSSFYCLEYFPSQMLRTGNNFEFSYSFEDVPFHSSYAHSQSLDRLMNPLIDQYLYYLARTQSTTGSTRELQFHQAGPNTMAEQSKNWLPGPCYRQQRLSKNLDFNNNSNFAWTAATKYHLNGRNSLTNPGIPMATNKDDEDQFFPINGVLVFGKTGAANKTTLENVLMTSEEEIKTTNPVATEEYGVVSSNLQSSTAGPQSQTINSQGALPGMVWQNRDVYLQGPIWAKIPHTDGNFHPSPLMGGFGLEHPPPQILIKNTPVPANPPEVFTPAKFASFITQYSTGQVSVEIEWELQKENSKRWNPEIQYTSNYAKSNNVEFAVNPDGVYTEPRPIGTRYLTRNL

SEQ ID NO: 161 - DNA, 3075 bp, Adeno-associated virus
tgagaactttcctttcaacgattgcgtcggacaagatggtgatctggtgggaggaggggaagatgaccgccaaggtcgtggagtcggccaaagccattcttggaggaagcaaggtgcgtgtggaccagaaatgcaagtcctcggcccagatagacccgactcccgtgatcgtcacctccaacaccaacatgtgcgccgtgattgacgggaactcaacgaccttcgagcaccagcagccgttgcaagaccggatgttcaaatttgaacttacccgccgtctggatcatgactttggaaaggtcaccaagcaggaagtgaaagactttttccggtgggcaaaggatcacgtggttgaggtggagcatgaattctacgtcaaaaagggtggagctaagaaaagacccgcccccagtgacgcagatataagtgagcccaaacgggcgcgcgagtcagttgcgcagccatcaacgtcagacgcggaagcttcgatcaactacgcggacaggtaccaaaaacaaatgttctcgtcacgtgggcatgaatctgatgctgtttccctgcagacaatgcgagagaatgaatcagaattcaaatatctgcttcactcacggacagaaagactgtttagagtgctttcccgtgtcagaatctcaacccgtttctgtcgtcaaaaaggcgtatcagaaactgtgctacattcatcatatcatgggaaaggtgccagacgcttgcactgcctgcgatctggtcaatgtggatttggatgactgcatctctgaacaataaatgatttaaatcaggtatggctgccgatggttatcctccagattggctcgaggacactctctctgaagggataagacagtggtggaagctcaaacctggcccaccaccaccaaagcccgcagagcggcataaggacgacagcaggggtcttgtgcttcctgggtacaagtacctcggacccttcaacggactcgacaagggggagccggtcaacgaggcagacgccgcggccctcgagcacgacaaggcctacgaccggcagctcgacagcggagacaacccgtacctcaagtacaaccacgccgacgcagagtttcaggagcgccttaaagaagatacgtcttttgggggcaacctcggacgagcagtcttccaggcgaaaaagagggttcttgaacctctgggcctggttgaggaacctgttaagacggctccgggaaaaaagaggccggtagagcactctcctgtggagccagactcctcctcgggaaccggaaaagcgggccagcggcctgcaagaaaaagattaaattttggtcagactggagacgcagactccgtacctgacccccagcctctcggacagccaccagcagccccctctggtctgggatctactacaatggctacaggcagtggcgcaccaatggcagacaataacgagggtgccgatggagtgggtaattcctcaggaaattggcattgcgattcccaatggctgggcgacagagtcatcaccaccagcacccgaacctgggccctgcccacatacaacaaccacctctacaagcaaatctccagccaatcaggagccagcaacgacaaccactactttggctacagcaccccctgggggtattttgacttcaacagattccactgccacttttcaccacgtgactggcaaagactcatcaacaacaactggggattccggcccaaaagactcaacttcaagctctttaatattcaagtcaaagaggtcacgcagaatgacggtacgacgacgattgccaataaccttaccagcacggttcaggtgtttactgactcggagtaccagctcccgtacgtcctgggctcggcgcatcaaggatgcctcccgccgtttccagcggacgtcttcatggtcccacagtatggatacctcaccctgaacaacgggagtcaggcggtaggacgctcttccttttactgcctggagtactttccttctcagatgctgcgtactggaaacaactttcagttcagctacacttttgaagacgtgcctttccacagcagctacgctcacagccagagtctggatcggctgatgaatcctctgatcgaccagtacctgtattatctgaacaagacacaaacaaatagtggaactcttcagcagtctcggctactgtttagccaagctggaccaaccaacatgtctcttcaagctaaaaactggctgcctggaccttgctacagacagcagcgtctgtcaaaacaggcaaacgacaacaacaacagcaactttccctggactgcagctacaaagtatcatctaaatggccgggactcgttggttaatccaggaccagctatggccagtcacaaggatgacgaagaaaagtttttccccatgcatggaaccctgatatttggtaaacaaggaacaaatgccaacgacgcggatttggaaaatgtcatgattacagatgaagaagaaatcagggccaccaatcccgtggctacggagcagtacgggactgtgtcaaataatttgcaaaactcaaacactggtccaactactggaactgtcaatcgccaaggagcgttacctggtatggtgtggcaggatcgagacgtgtacctgcagggacccatttgggccaagattcctcacaccgatggacactttcatccttctccactgatgggaggttttggactcaaacacccgcctcctcagatcatgatcaaaaacactcccgttccagccaatcctcccacaaacttcagttctgccaagtttgcttctttcatcacacagtattccacgggacaggtcagcgtggagatcgagtgggagctgcagaaggagaacagcaaacgctggaatcccgaaattcagtacacttccaactacaacaagtctgttaatgtggactttactgtggacactaatggtgtgtattcagagcctcgccccattggcaccagatacctgactcgtaatctgtaattgcttgttaatcaataaaccgtttaattcgtttcagttgaactttggtctctgcgaagggcgaa

SEQ ID NO: 162 - DNA, 3142 bp, Adeno-associated virus
aaaacgacgggccagtgattgtaatacgactcactatagggcgaaattgaaattagcggccgcgaattcgcctttcgcagagaccaaagttcaactgaaacgaattaaacggtttattgattaacaagcaattacagattacgagtcaggtatctggtgccaatggggcgaggctctgaatacacaccattagtgtccacagtaaagtccacattaacagacttgttgtagttggaagtgtactgaatttcgggattccagcgtttgctgttctccttctgcagctcccactcgatctccacgctgacctgtcccgtggaatactgtgtgatgaaagaagcaaacttggcagaactgaagtttgtgggaggattggctggaacgggagtgtttttgatcatgatctgaggaggcgggtgtttgagtccaaaacctcccatcagtggagaaggatgaaagtgtccatcggtgtgaggaatcttggcccaaatgggtccctgcaggtacacgtctcgatcctgccacaccataccaggtaacgctccttggtgattgacagttccagtagttggaccagtgtttgagttttgcaaattatttgacacagtcccgtactgctccgtagccacgggattggtggccctgatttcttcttcatctgtaatcatgacattttccaaatccgcgtcgttggcatttgttccttgtttaccaaatatcagggttccatgcatggggaaaaacttttcttcgtcatccttgtgactggccatagctggtcctggattaaccaacgagtcccggccatttagatgatactttgtagctgcagtccagggaaagttgctgttgttgttgtcgtttgcctgttttgacagacgctgctgtctgtagcaaggtccaggcagccagtttttagcttgaagagacatgttggttggtccagcttggctaaacagtagccgagactgctgaagagttccactatttgtttgtgtcttgttcagataatacaggtactggtcgatcagaggattcatcagccgatccagactctggctgtgagcgtagctgctgtggaaaggcacgtcttcaaaagtgtagctgaactgaaagttgtttccagtacgcagcatctgagaaggaaagtactccaggcagtaaaaggaagagcgtcctaccgcctgactcccgttgttcagggtgaggtatccatactgtgggaccatgaagacgtccgctggaaacggcgggaggcatccttgatgcgccgagcccaggacgtacgggagctggtactccgagtcagtaaacacctgaaccgtgctggtaaggttattggcaatcgtcgtcgtaccgtcattctgcgtgacctctttgacttgaatattaaagagcttgaagttgagtcttttgggccggaatccccggttgttgttgacgagtctttgccagtcacgtggtgaaaagtggcagtggaatctgttgaagtcaaaatacccccagggggtgctgtagccaaagtagtggttgtcgttgctggctcctgattggctggagatttgcttgtagaggtggttgttgtatgtgggcagggcccaggttcgggtgctggtggtgatgactctgtcgcccagccattgggaatcgcaatgccaatttcctgaggaattacccactccatcggcaccctcgttattgtctgccattggtgcgccactgcctgtagccattgtagtagatcccagaccagagggggctgctggtggctgtccgagaggctgggggtcaggtacggagtctgcgtctccagtctgaccaaaatttaatctttttcttgcaggctgctggcccgcttttccggttcccgaggaggagtctggctccacaggagagtgctctaccggcctcttttttcccggagccgtcttaacaggctcctcaaccaggcccagaggttcaagaaccctctttttcgcctggaagactgctcgtccgaggttgcccccaaaagacgtatcttctttaaggcgctcctgaaactctgcgtcggcgtggttgtacttgaggtacgggttgtctccgctgtcgagctgccggtcgtaggccttgtcgtgctcgagggccgcggcgtctgcctcgttgaccggctcccccttgtcgagtccgttgaagggtccgaggtacttgtacccaggaagcacaagacccctgctgtcgtccttatgccgctctgcgggctttggtggtggtgggccaggtttgagcttccaccactgtcttattccttcagagagagtgtcctcgagccaatctggaagataaccatcggcagccatacctgatttaaatcatttattgttcagagatgcagtcatccaaatccacattgaccagatcgcaggcagtgcaagcgtctggcacctttcccatgatatgatgaatgtagcacagtttctgatacgcctttttgacgacagaaacgggttgagattctgacacgggaaagcactctaaacagtctttctgtccgtgagtgaagcagatatttgaattctgattcattctctcgcattgtctgcagggaaacagcatcagattcatgcccacgtgacgagaacatttgttttggtacctgtccgcgtagttgatcgaagcttccgcgtctgacgtcgatggctgcgcaactgactcgcgcgcccgtttgggctcacttatatctgcgtcactgggggcgggtcttttcttagctccaccctttttgacgtagaattcatgctccacctcaaccacgtgatcctttgcccaccggaaaaagtctttcacttcctgcttggtgacctttccaaagtcatgatccagacggcgggtaagttcaaatttgaacatccggtcttgcaacggctgctggtgctcgaaggtcgttgagttcccgtcaatcacggcgcacatgttggtgttggaggtgacgatcacgggagtcgggtctatctgggccgaggacttgcatttctggtccacacgcaccttgcttcctccaagaatggctttggccgactccacgaccttggcggtcatcttcccctcctcccaccagatcaccatcttgtcgacgcaatggtaaaaggaaagttctcattgg

SEQ ID NO: 163 - protein, 735 aa, Adeno-associated virus 2
MAADGYLPDWLEDTLSEGIRQWWKLKPGPPPPKPAERHKDDSRGLVLPGYKYLGPFNGLDKGEPVNEADAAALEHDKAYDRQLDSGDNPYLKYNHADAEFQERLKEDTSFGGNLGRAVFQAKKRVLEPLGLVEEPVKTAPGKKRPVEHSPVEPDSSSGTGKAGQQPARKRLNFGQTGDADSVPDPQPLGEPPATPAAVGPTTMASGGGAPMADNNEGADGVGNASGNWHCDSTWLGDRVITTSTRTWALPTYNNHLYKQISSASTGASNDNHYFGYSTPWGYFDFNRFHCHFSPRDWQRLINNNWGFRPKRLNFKLFNIQVKEVTQNDGTTTIANNLTSTVQVFTDSEYQLPYVLGSAHQGCLPPFPADVFMIPQYGYLTLNNGSQAVGRSSFYCLEYFPSQMLRTGNNFTFSYTFEDVPFHSSYAHSQSLDRLMNPLIDQYLYYLNRTQNQSGSAQDKALLFSRGSPAGMSVQPKNWLPGPCYRQQRVSKTKTDNNNSNFTWTGASKYNLNGRESIINPGTAMASHKDDKDKFFPMSGVMIFGKESAGASNTALDNVMITDEEEIKATNPVATERFGTVAVNFQSSSTDPATGDVHVMGALPGMVWQDRDVYLQGPIWAKIPHTDGHFHPSPLMGGFGLKHPPPQILIKNTPVPANPPAEFSATKFASFITQYSTGQVSVEIEWELQKENSKRWNPEVQYTSNYAKSANVDFTVDNNGLYTEPRPIGTRYLTRP

SEQ ID NO: 164 - protein, 740 aa, Adeno-associated virus 2
MAADGYLPDWLEDTLSEGIRQWWKLKPGPPPPKPAERHKDDSRGLVLPGYKYLGPFNGLDKGEPVNAADAAALEHDKAYDRQLDSGDNPYLKYNHADAEFQERLKEDTSFGGNLGRAVFQAKKRVLEPLGLVEEPVKTAPGKKRPVEHSPVEPDSSSGTGKAGQQPARKRLNFGQTGDADSVPDPQPLGQPPAAPSGLGTNTMATGSGAPMADNNEGADGVGNSSGNWHCDSTWMGDRVITTSTRTWALPTYNNHLYKQISSQSGASNDNHYFGYSTPWGYFDFNRFHCHFSPRDWQRLINNNWGFRPKRLNFKLFNIQVKEVTQNDGTTTIANNLTSTVQVFTDSEYQLPYVLGSAHQGCLPPFPADVFMVPQYGYLTLNNGSQAVGRSSFYCLEYFPSQMLRTGNNFTFSYTFEDVPFHSSYAHSQSLDRLMNPLIDQYLYYLSRTNTPSGTTTQSGLQFSQAGASDIRDQSRNWLPGPCYRQQRVSKTSADNNNSEYSWTGATKYHLNGRDSLVNPGPAMASHKDDEEKFFPQSGVLIFGKQGSEKTNVDIEKVMITDEEEIRTTNPVATEQYGSVSTNLQRGNRQAATADVNTQGVLPGMVWQDRDVYLQGPIWAKIPHTDGHFHPSPLMGGFGLKHPPPQILIKNTPVPANPSTTFSAAKFASFITQYSTGQVSVEIEWELQKENSKRWNPEIQYTSNYNKSVNVDFTVDTNGVYSEPRPIGTRYLTRNLLLAAA

SEQ ID NO: 165 - protein, 734 aa, Adeno-associated virus 2
MAADGYLPDWLEDTLSEGIRQWWKLKPGPPPPKPAERHKDDSRGLVLPGYKYLGPFNGLDKGEPVNEADAAALEHDKAYDRQLDSGDNPYLKYNHADAEFQERLKEDTSFGGNLGRAVFQAKKRVLEPLGLVEEPVKTAPGKKRPVEHSPVEPDSSSGTGKAGQQPARKRLNFGQTGDADSVPDPQPLGQPPAAPSGLGTNTMATGSGAPMADNNEGADGVGNSSGNWHCDSTWMGDRVITTSTRTWALPTYNNHLYKQISSQSGASNDNHYFGYSTPWGYFDFNRFHCHFSPRDWQRLINNNWGFRPKRLNFKLFNIQVKEVTQNDGTTTIANNLTSTVQVFTDSEYQLPYVLGSAHQGCLPPFPADVFMVPQYGYLTLNNGSQAVGRSSFYCLEYFPSQMLRTGNNFTFSYTFEDVPFHSSYAHSQSLDRLMNPLIDQYLYYLSRTNTPSGTTTQSGLQFSQAGASDIRDQSRNWLPGPCYRQQRVSKTSADNNNSEYSWTGATMYHLNGRDSLVNPGPAMASHKDDEEKFFPQSGVLIFGKQGSEKTNVDIEKVMITDEEEIRTTNPVATEQYGSVSTNLQRGNRQAATADVNTQGVLPGMVWQDRDVYLQGPIWAKIPHTDGHFHPSPLMGGFGLKHPPPQILIKNTPVPANPSTTFSAAKFASFITQYSTGQVSVEIEWELQKENSKRWNPEIQYTSNYNKSINVDFTVDTNGVYSEPRPIGTRYLTRN

SEQ ID NO: 166 - protein, 734 aa, Adeno-associated virus 2
MAADGYLPDWLEDTLSEGIRQWWKLKPGPPPPKPAERHKDDSRGLVLPGYKYLGPFNGLDKGEPVNEADAAALEHDKAYDRQLDSGDNPYLKYNHADAEFQERLKEDTSFGGNLGRAVFQAKKRVLEPLGLVEEPVKTAPGKKRPVEHSPVEPDSSSGTGKAGQQPARKRLNFGQTGDADSVPDPQPLGQPPAAPSGLGTNTMATGSGAPMADNNEGADGVGNSSGNWHCDSTWMGDRVITTSTRTWALPTYNNHLYKQISSQSGASNDNHYFGYSTPWGYFDFNRFHCHFSPRDWQRLINNNWGFRPKRLNFKLFNIQVKEVTQNDGTTTIANNLTSTVQVFTDSEYQLPYVLGSAHQGCLPPFPADVFMVPQYGYLTLNNGSQAVGRSSFYCLEYFPSQMLRTGNNFTFSYTFEDVPFHSSYAHSQSLDRLMNPLIDQYLYYLSRTNTPSGTTTQSGLQFSQAGASDIRDQSRNWLPGPCYRQQRVSKTSADNNNSEYSWTGATKYHLNGRDSLVNPGPAMASHKDDEEKFFPQSGVLIFGKQGSEKTNVDIEKVMITDEEEIRTTNPVATEQYGSVSTNLQRGNRQAATADVNTQGVLPGMVWQDRDVYLQGPIWAKIPHTDGHFHPSPLMGGFGLKHPPPQILIKNTPVPANPSTTFSEAKFASFITQYSTGQVSVEIEWELQKENSKRWNPEIQYTSNYNKSVNVDFTVDTNGVYSEPRPIGTRYLTRN

SEQ ID NO: 167 - protein, 739 aa, Adeno-associated virus 2
MAADGYLPDWLEDTLSEGIRQWWKLKPGPPPPKPAERHKDDSRGLVLPGYKYLGPFNGLDKGEPVNEADAAALEHDKAYDRQLDSGDNPYLKYNHADAEFQERLKEDTSFGGNLGRAVFQAKKRVLEPLGLVEEPVKTAPGKKRPVEHSPVEPDSSSGTGKAGQQPARKRLNFGQTGDADSVPDPQPLGQPPAAPSGLGTNTMATGSGAPMADNNEGADGVGNSSGNWHCDSTWMGDRVITTSTRTWALPTYNNHLYKQISSQSGASNDNHYFGYSTPWGYFDFNRFHCHFSPRDWQRLINNNWGFRPKRLNFKLFNIQVKEVTQNDGTTTIANNLTSTVQVFTDSEYQLPYVLGSAHQGCLPPFPADVFMVPQYGYLTLNNGSQAVGRSSFYCLEYFPSQMLRTGNNFTFSYTFEDVPFHSSYAHSQSLDRLMNPLIDQYLYYLSRTNTPSGTTTQSGLQFSQAGASDIRDQSRNWLPGPCYRQQRVSKTSADNNNSEYSWTGATKYHLNGRDSLVNPGPAMASHKDDEEKFFPQSGVLIFGKQGSEKTNVDIEKVMITDEEEIRTTNPVATEQYGSVSTNLQRGNRQAATADVNTQGVLPGMVWQDRDVYLQGPIWAKIPHTDGHFHPSPLMGGFGLKHPPPQILIKNTPVPANPSTTFSAAKFASFITQYSTGQVSVEIEWELQKENSKRWNPEIQYTSNYNKSVNVDFTVDTNGVYSEPRPIGTRYLTRNLLLAA

SEQ ID NO: 168 - protein, 725 aa, Adeno-associated virus 2
MAADGYLPDWLEDTLSEGIRQWWKLKPGPPPPKPAERHKDDSRGLVLPGYKYLGPFNGLDKGEPVNEADAAALEHDKAYDRQLDSGDNPYLKYNHADAEFQERLKEDTSFGGNLGRAVFQAKKRVLEPLGLVEEPVKTAPGKKRPVEHSPVEPDSSSGTGKAGQQPARKRLNFGQTGDADSVPDPQPLGQPPAAPSGLGTNTMATGSGAPMADNNEGADGVGNSSGNWHCDSTWMGDRVITTSTRTWALPTYNNHLYKQISSQSGASNDNHYFGYSTPWGYFDFNRFHCHFSPRDWQRLINNNWGFRPKRLNFKLFNIQVKEVTQNDGTTTIANNLTSTVQVFTDSEYQLPYVLGSAHQGCLPPFPADVFMVPQYGYLTLNNGSQAVGRSSFYCLEYFPSQMLRTGNNFTFSYTFEDVPFHSSYAHSQSLDRLMNPLIDQYLYYLSRTNTPSGTTTQSGLQFSQAGASDIRDQSRNWLPGPCYRQQRVSKTSADNNNSEYSWTGATKYHLNGRDSLVNPGPAMASHKDDEEKFFPQSGVLIFGKQGSEKTNVDIEKVMITDEEEIRTTNPVATEQYGSVSTNLQRGNRQAATADVNTQGVLPGMVWQDRDVYLQGPIWAKIPHTDGHFHPSPLMGGFGLKHPPPQILIKNTPVPANPSTTFSAAKFASFITQYSTGQVSVEIEWELQKENSKRWNPEIQYTSNYNKSVNVDFTVDTNGVYSEPRP

SEQ ID NO: 169 - protein, 707 aa, Adeno-associated virus 2
MAADGYLPDWLEDTLSEGIRQWWKLKPGPPPPKPAERHKDDSRGLVLPGYKYLGPFNGLDKGEPVNEADAAALEHDKAYDRQLDSGDNPYLKYNHADAEFQERLKEDTSFGGNLGRAVFQAKKRVLEPLGLVEEPVKTAPGKKRPVEHSPVEPDSSSGTGKAGQQPARKRLNFGQTGDADSVPDPQPLGQPPAAPSGLGTNTMATGSGAPMADNNEGADGVGNSSGNWHCDSTWMGDRVITTSTRTWALPTYNNHLYKQISSQSGASNDNHYFGYSTPWGYFDFNRFHCHFSPRDWQRLINNNWGFRPKRLNFKLFNIQVKEVTQNDGTTTIANNLTSTVQVFTDSEYQLPYVLGSAHQGCLPPFPADVFMVPQYGYLTLNNGSQAVGRSSFYCLEYFPSQMLRTGNNFTFSYTFEDVPFHSSYAHSQSLDRLMNPLIDQYLYYLSRTNTPSGTTTQSGLQFSQAGASDIRDQSRNWLPGPCYRQQRVSKTSADNNNSEYSWTGATKYHLNGRDSLVNPGPAMASHKDDEEKFFPQSGVLIFGKQGSEKTNVDIEKVMITDEEEIRTTNPVATEQYGSCIYQPPERQQTSSYRRCQHTRRSSRHGLAGQRCVPSGAHLGKDSTHGRTFSPLSPHGWIRTTPSSTDSHQEHPGTCESFDHLQCGKVCFLHHTVLHGTGQRGDRVRAAEGKQQTLESRNSVHFQLQQVC

SEQ ID NO: 170 - protein, 739 aa, Adeno-associated virus 2; identical to SEQ ID NO: 167

SEQ ID NO: 171 - protein, 737 aa, Adeno-associated virus 2
MASDGYLPDWLEDNLSEGIREWWDLKPGAPKPKANQQKQDDGRGLVLPGYKYLGPFNGLDKGEPVNAADAAALEHDKAYDQQLKAGDNPYLRYNHADAEFQERLQEDTSFGGNLGRAVFQAKKRVLEPFGLVEEGAKTAPGKKRPVEQSPQEPDSSSGIGKTGQQPAKKRLNFGQTGDSESVPDPQPLGEPPATPAAVGPTTMASGGGAPMADNNEGADGVGNASGNWHCDSTWLGDRVITTSTRTWALPTYNNHLYKQISSASTGASNDNHYFGYSTPWGYFDFNRFHCHFSPRDWQRLINNNWGFRPKRLNFKLFNIQVKEVTTNDGTTTIANNLTSTVQVFTDSEYQLPYVLGSAHQGCLPPFPADVFMVPQYGYLTLNNGSQAVGRSSFYCLEYFPSQMLRTGNNFTFSYTFEDVPFHSSYAHSQSLDRLMNPLIDQYLYYLSRTNTPSGTTTQSGLQFSQAGASDIRDQSRNWLPGPCYRQQRVSKTSADNNNSEYSWTGATKYHLNGRDSLVNPGPAMASHKDDEEKFFPQSGVLIFGKQGSEKTNVDIEKVMITDEEEIRTTNPVATEQYGSVSTNLQRGNRQAATADVNTQGVLPGMVWQDRDVYLQGPIWAKIPHTDGHFHPSPLMGGFGLKHHPPQILIKNTPVPANPSTTFSAAKFASFITQYSTGQVSVEIEWELQKENSKRWNPEIQYTSNYNKSVNVDFTVDTNGVYSEPRPIGTRYLTRNLL

SEQ ID NO: 172 - protein, 741 aa, Adeno-associated virus 2
MAADGYLPDWLEDTLSEGIREWWALKPGAPKPKANQQKQDDGRGLVLPGYKYLGPFNGLDKGEPVNEADAAALEHDKAYDQQLQAGDNPYLRYNHADAEFQERLQEDTSFGGNLGRAVFQAKKRVLEPLGLVEEPVKTAPGKKRPVEHSPVEPDSSSGTGKSGQQPARKRLNFGQTGDADSVPDPQPLGQPPAAPSGLGTNTMATGSGAPMADNNEGADGVGNSSGNWHCDSTWMGDRVITTSTRTWALPTYNNHLYKQISSQSGASNDNHYFGYSTPWGYFDFNRFHCHFSPRDWQRLINNNWGFRPKRLNFKLFNIQVKEVTQNDGTTTIANNLTSTVQVFTDSEYQLPYVLGSAHQGCLPPFPADVFMVPQYGYLTLNNGSQAVGRSSFYCLEYFPSQMLRTGNNFTFSYTFEDVPFHSSYAHSQSLDRLMNPLIDQYLYYLSRTNTPSGTTTQSGLQFSQAGASDIRDQSRNWLPGPCYRQQRVSKTSADNNNSEYSWTGATKYHLNGRDSLVNPGPAMASHKDDEEKFFPQSGVLIFGKQGSEKTNVDIEKVMITDEEEIRTTNPVATEQYGSVSTNLQRGNLANHNNTTNARQAATADVNTQGVLPGMVWQDRDVYLQGPIWAKIPHTDGHFHPSPLMGGFGLKHPPPQILIKNTPVPANPSTTFSAAKFASFITQYSTGQVSVEIEWELQKENSKRWNPEIQYTSNYNKSINVDFTVDTNGVYSEPRPIGTRYL

SEQ ID NO: 173 - protein, 730 aa, Adeno-associated virus 2
MASDGYLPDWLEDNLSEGIREWWDLKPGAPKPKANQQKQDDGRGLVLPGYKYLGPFNGLDKGEPVNAADAAALEHDKAYDQQLKAGDNPYLRYNHADAEFQERLQEDTSFGGNLGRAVFQAKKRVLEPFGLVEEGAKTAPGKKRPVEQSPQEPDSSSGIGKTGQQPAKKRLNFGQTGDSESVPDPQPLGEPPATPAAVGPTTMASGGGAPMADNNEGADGVGNASGNWHCDSTWLGDRVITTSTRTWALPTYNNHLYKQISSASTGASNDNHYFGYSTPWGYFDFNRFHCHFSPRDWQRLINNNWGFRPKRLNFKLFNIQVKEVTTNDGVTTIANNLTSTVQVFSDSEYQLPYVLGSAHQGCLPPFPADVFMIPQYGYLTLNNGSQAVGRSSFYCLEYFPSQMLRTGNNFTFSYTFEDVPFHSSYAHSQSLDRLMNPLIDQYLYYLNRTQNQSGSAQNNDLLFSRGSPAGMSVQPKNWLPGPCYRQQRVSKTKTDNNNSNFTWTGASKYNLNGRESIINPGTAMASHKDDKDKFFPMSGVMIFGKESAGASNTALDNVMITDEEEIKATNPVATERFGTVAVNLQSSSTDPATGDVHVMGALPGMVWQDRDVYLQGPIWAKIPHTDGHFHPSPLMGGFGLKNPPPQILIKNTPVPANPPAEFSATKFASFITQYSTGQVSVEIEWELQKENSKRWNPEVQYTSNYAKSANVDFTVDNNGLYTEPRPIGTR

SEQ ID NO: 174 - protein, 735 aa, Adeno-associated virus 2
  MOD_RES (239)..(239): Xaa can be any naturally occurring amino acid
MASDGYLPDWLEDNLSEGIREWWDLKPGAPKPKANQQKQDDGRGLVLPGYKYLGPFNGLDKGEPVNAADAAALEHDKAYDQQLKAGDNPYLRYNHADAEFQERLQEDTSFGGNLGRAVFQAKKRVLEPFGLVEEGAKTAPGKKRPVEQSPQEPDSSSGIGKTGQQPAKKRLNFGQTGDSESVPDPQPLGEPPATPAAVGPTTMASGGGAPMADNNEGADGVGNASGNWHCDSTWLGDRXITTSTRTWALPTYNNHLYKQISSASTGASNDNHYFGYSTPWGYFDFNRFHCHFSPRDWQRLINNNWGFRPKRLNFKLFNIQVKEVTTNDGVTTIANNLTSTVQVFSDSEYQLPYVLGSAHQGCLPPFPADVFMIPQYGYLTLNNGSQAVGRSSFYCLEYFPSQMLRTGNNFTFSYTFEDVPFHSSYAHSQSLDRLMNPLIDQYLYYLNRTQNQSGSAQNNDLLFSRGSPAGMSVQPKNWLPGPCYRQQRVSKTKTDNNNSNFTWTGASKYNLNGRESIINPGTAMASHKDDKDKFFPMSGVMIFGKESAGASNTALDNVMITDEEEIKATNPVATERFGTVAVNLQSSSTDPATGDVHVMGALPGMVWQDRDVYLQGPIWAKIPHTDGHFHPSPLMGGFGLKNPPPQILIKNTPVPANPPAEFSATKFASFITQYSTGQVSVEIEWELQKENSKRWNPEVQYTSNYAKSANVDFTVDNNGLYTEPRPIGTRYLTRP

SEQ ID NO: 175 - protein, 733 aa, Adeno-associated virus 2
MASDGYLPDWLEDNLSEGIREWWDLKPGAPKPKANQQKQDDGRGLVLPGYKYLGPFNGLDKGEPVNAADAAALEHDKAYDQQLKAGDNPYLRYNHADAEFQERLQEDTSFGGNLGRAVFLAKKRVLEPFGLVEEGAKTAPGKKRPVEQSPQEPDSSSGIGKTGQQPAKKRLNFGQTGDSESVPDPQPLGEPPATPAAVGPTTMASGGGAPMADNNEGADGVGNASGNWHCDSTWLGDRVITTSTRTWALPTYNNHLYKQISSASTGASNDNHYFGYSTPWGYFDFNRFHCHFSPRDWQRLINNNWGFRPKRLNFKLFNIQVKEVTTNDGVTTIANNLTSTVQVFSDSEYQLPYVLGSAHQGCLPPFPADVFMIPQYGYLTLNNGSQAVGRSSFYCLEYFPSQMLRTGNNFTFSYTFEDVPFHSSYAHSQSLDRLMNPLIDQYLYYLNRTQNQSGSAQNNDLLFSRGSPAGMSVQPKNWLPGPCYRQQRVSKTKTDNNNSNFTWTGASKYNLNGRESIINPGTAMASHKDDKDKFFPMSGVMIFGKESAGASNTALDNVMITDEEEIKATNPVATERFGTVAVNLQSSSTDPATGDVHVMGALPGMVWQDRDVYLQGPIWAKIPHTDGHFHPSPLMGGFGLKNPPPQILIKNTPVPANPPAEFSATKFASFITQYSTGQVSVEIEWELQKENSKRWNPEVQYTSNYAKSANVDFTVDNNGLYTEPRPIGTRYLT

SEQ ID NO: 176 - protein, 734 aa, Adeno-associated virus 2
MAADGYLPDWLEDTLSEGIRQWWKLKPGPPPPKPAERHKDDSRGLVLPGCKYLGPFNGLDKGEPVNEADAAALEHDKAYDRQLDSGDNPYLKYNHADAEFQERLKEDTSFGGNLGRAVFQAKKRVLEPLGLVEEPVKTAPGKKRPVEHSPVEPDSSSGTGKAGQQPARKRLNFGQTGDADSVPDPQPLGQPPAAPSGLGTNTMATGSGAPMADNNEGADGVGNSSGNWHCDSTWMGDRVITTSTRTWALPTYNNHLYKQISSQSGASNDNHYFGYSTPWGYFDFNRFHCHFSPRDWQRLINNNWGFRPKRLNFKLFNIQVKEVTQNDGTTTIANNLTSTVQVFSDSEYQLPYVLGSAHQGCLPPFPADVFMIPQYGYLTLNNGSQAVGRSSFYCLEYFPSQMLRTGNNFTFNYTFEDVPFHSSYAHSQSLDRLMNPLIDQYLYYLNRTQNQSGSAQNNDLLFSRGSPAGMSVQPKNWLPGPCYRQQRVSKTKTDNNNSNFTWTGASKYNLNGRESIINPGTAMASHKDDKDKFFPMSGVMIFGKESAGASNTALDNVMITDEEEIKATNPVATERFGTVAVNLQSSSTDPATGDVHVMGALPGMVWQDRDVYLQGPIWAKIPHTDGHFHPSPLMGGFGLKNPPPQILIKNTPVPANPPAEFSATKFASFITQYSTGQVSVEIEWELQKENSKRWNPEVQYTSNYAKSANVDFTVDNNGLYTEPRPIGTRYLTRP

SEQ ID NO: 177 - protein, 734 aa, Adeno-associated virus 2
MAADGYLPDWLEDTLSEGIRQWWKLKPGPPPPKPAERHKDDSRGLVLPGYKYLGPFNGLDKGEPVNEADAAALEHDKAYDRQLDSGDNPYLKYNHADAEFQERLKEDTSFGGNLGRAVFQAKKRVLEPLGLVEEPVKTAPGKKRPVEHSPVEPDSSSGTGKAGQQPARKRLNFGQTGDADSVPDPQPLGQPPAAPSGLGTNTMATGSGAPMADNNEGADGVGNSSGNWHCDSTWMGDRVITTSTRTWALSTYNNHLYKQISSQSGASNDNHYFGYSTPWGYFDFNRFHCHFSPRDWQRLINNNWGFRPKRLNFKLFNIQVKEVTQNDGTTTIANNLTSTVQVFTDSEYQLPYVLGSAHQGCLPPFPADVFMVPQYGYLTLNNGSQAVGRSSFYCLEYFPSQMLRTGNNFTFSYTFEDVPFHSSYAHSQSLDRLMNPLIDQYLYYLSRTNTPSGTTTQSRLQFSQAGASDIRDQSRNWLPGPCYRQQRVSKTSADNNNSEYSWTGATKYHLNGRDSLVNPGPAMASHKDDEEKFFPQSGVLIFGKQGSEKTNVDIEKVMITDEEEIRTTNPVATEQYGSVSTNLQRGNRQAATADVNTQGVLPGMVWQDRDVYLQGPIWAKIPHTDGHFHPSPLMGGFGLKHPPPQILIKNTPVPANPSTTFSAAKFASFITQYSTGQVSVEIEWELQKENSKRWNPEIQYTSNYNKSINVDFTVDTNGVYSEPRPIGTRYLTRN

SEQ ID NO: 178 - protein, 738 aa, Adeno-associated virus 2
MAADGYLPDWLEDTLSEGIRQWWKLKPGPPPPKPAERHKDDSRGLVLPGYKYLGPFNGLDKGEPVNEADAAALEHDKAYDRQLDGGDNPYLKYNHADAEFQERLKEDTSFGGNLGRAVFQAKKRVLEPLGLVEEPVKTAPGKKRPVEHSPVEPDSSSGTGKAGQQPARKRLNFGQTGDADSVPDPQPLGQPPAAPSGLGTNTMATGSGAPMADNNEGADGVGNSSGNWHCDSTWMGDRVITTSTRTWALPTYNNHLYKQISSQSGASNDNHYFGYSTPWGYFDFNRFHCHFSPRDWQRLINNNWGFRPKRLNFKLFNIQVKEVTQNDGTTTIANNLTSTVQVFTDSEYQLPYVLGSAHQGCLPPFPADVFMVPQYGYLTLNNGSQAVGRSSFYCLEYFPSQMLRTGNNFTFSYTFEDVPFHSSYAHSQSLDRLMNPLIDQYLYYLSRTNTPSGTTTQSGLQFSQAGASDIRDQSRNWLPGPCYRQQRVSKTSADNNNSEYSWTGATKYHLNGRDSLVNPGPAMASHKDDEEKFFPQSGVLIFGKQGSEKTNVDIEKVMITDEEEIRTTNPVATEQYGSVSTNLQRGNRQAATADVNTQGVLPGMVWQDRDVYLQGPIWAKIPHTDGHFHPSPLMGGFGLKHPPPQILIKNTPVPANPSTTFSAAKFASFITQYSTGQVSVEIEWELQKENSKRWNPEIQYTSNYNKSVNVDFTVDTNGVYSEPRPIGTRYLTRNLLRP

SEQ ID NO: 179 - DNA, 2208 bp, Adeno-associated virus
atggctgccgatggttatcttccagattggctcgaggacactctctctgaaggaataagacagtggtggaagctcaaacctggcccaccaccaccaaagcccgcagagcggcataaggacgacagcaggggtcttgtgcttcctgggtacaagtacctcggacccttcaacggactcgacaagggggagccggtcaacgaggcagacgccgcggccctcgagcacgacaaggcctacgaccggcagctcgacagcggagacaacccgtacctcaagtacaaccacgccgacgcagagtttcaggagcgccttaaagaagatacgtcttttgggggcaacctcggacgagcagtcttccaggcgaaaaagagggttcttgaacctctgggcctggttgaggaacctgttaagacggctccgggaaaaaagaggccggtagagcactctcctgtggagccagactcctcctcgggaaccggaaaagcgggccagcagcctgcaagaaaaagattaaattttggtcagactggagacgcagactccgtacctgacccccagcctctcggacagccaccagcagccccctctggtctgggatctactacaatggctacaggcagtggcgcaccaatggcagacaataacgagggtgccgatggagtgggtaattcctcaggaaattggcattgcgattcccaatggctgggcgacagagtcatcaccaccagcacccgaacctgggccctgcccacatacaacaaccacctctacaagcaaatctccagccaatcaggagccagcaacgacaaccactactttggctacagcaccccctgggggtattttgacttcaacagattccactgccacttttcaccacgtgactggcaaagactcatcaacaacaactggggattccggcccaaaagactcaacttcaagctctttaatattcaagtcaaagaggtcacgcagaatggcggtacgacgacgattgccaataaccttaccagcacggttcaggtgtttactgactcggagtaccagctcccgtacgtcctgggctcggcgcatcaaggatgcctcccgccgtttccagcggacgtcttcatggtcccacagtatggatacctcaccctgaacaacgggagtcaggcggtaggacgctcttccttttactgcctggagtactttccttctcagatgctgcgtactggaaacaactttcagttcagctacacttttgaagacgtgcctttccacagcagctacgctcacagccagagtctggatcggctgatgaatcctctgatcgaccagtacctgtattatctgaacaagacacaaacaaatagtggaactcttcagcagtctcggctactgtttagccaagctggaccaaccaacatgtctcttcaagctaaaaactggctgcctggaccttgctacagacagcagcgtctgtcaaaacaggcaaacggcaacaacaacagcaactttccctggactgcagctacaaagtatcatctaaatggccgggactcgttggttaatccaggaccagctatggccagtcacaaggatgacgaagaaaagtttttccccatgcatggaaccctgatatttggtaaacaaggaacaaatgccaacgacgcggatttggaaaatgtcatgattacagatgaagaagaaatcagggccaccaatcccgtggctacggagcagtacgggactgtgtcaaataatttgcaaaactcaaacactggtccaactactggaactgtcaatcaccaaggagcgttacctggtatggtgtggcaggatcgagacgtgtacctgcagggacccatttgggccaagattcctcacaccgatggacactttcatccttctccactgacgggaggttttggactcaaacacccgcctcctcagatcatgatcaaaaacactcccgttccagccaatcctcccacaaacttcagttctgccaagtttgcttctttcatcacacagtattccacgggacaggtcagcgtggagatcgagtgggagctgcagaaggagaacagcaaacgctggaatcccgaaattcagtacacttccaactacaacaagtctgttaatgtggactttactgtggacactaatggtgtgtattcagagcctcgccccattggcaccagatacctgactcgtaatctgtaa

SEQ ID NO: 180 - protein, 735 aa, Adeno-associated virus
MAADGYLPDWLEDTLSEGIRQWWKLKPGPPPPKPAERHKDDSRGLVLPGYKYLGPFNGLDKGEPVNEADAAALEHDKAYDRQLDSGDNPYLKYNHADAEFQERLKEDTSFGGNLGRAVFQAKKRVLEPLGLVEEPVKTAPGKKRPVEHSPVEPDSSSGTGKAGQQPARKRLNFGQTGDADSVPDPQPLGQPPAAPSGLGSTTMATGSGAPMADNNEGADGVGNSSGNWHCDSQWLGDRVITTSTRTWALPTYNNHLYKQISSQSGASNDNHYFGYSTPWGYFDFNRFHCHFSPRDWQRLINNNWGFRPKRLNFKLFNIQVKEVTQNGGTTTIANNLTSTVQVFTDSEYQLPYVLGSAHQGCLPPFPADVFMVPQYGYLTLNNGSQAVGRSSFYCLEYFPSQMLRTGNNFQFSYTFEDVPFHSSYAHSQSLDRLMNPLIDQYLYYLNKTQTNSGTLQQSRLLFSQAGPTNMSLQAKNWLPGPCYRQQRLSKQANGNNNSNFPWTAATKYHLNGRDSLVNPGPAMASHKDDEEKFFPMHGTLIFGKQGTNANDADLENVMITDEEEIRATNPVATEQYGTVSNNLQNSNTGPTTGTVNHQGALPGMVWQDRDVYLQGPIWAKIPHTDGHFHPSPLTGGFGLKHPPPQIMIKNTPVPANPPTNFSSAKFASFITQYSTGQVSVEIEWELQKENSKRWNPEIQYTSNYNKSVNVDFTVDTNGVYSEPRPIGTRYLTRNL

SEQ ID NO: 181 - DNA, 2208 bp, Adeno-associated virus
atggctgccgatggttatcttccagattggctcgaggacactctctctgaaggaataagacagtggtggaagctcaaacctggcccaccaccaccaaagctcgcagagcggcatcaggacgacagcaggggtcttgtgcttcctgggtacaagtacctcggacccttcaacggactcgacaaaggagagccggtcaacgaggcagacgccgcggccctcgagcacgacaaggcctacgaccggcagctcgacagcggagacaacccgtacctcaagtacaaccacgccgacgcggagtttcaggagcgtcttaaagaagatacgtcttttgggggcaacctcggacgagcagtcttccaggcgaaaaagagggttcttgaacctctgggcctggttgaggaacctgttaagacggctccgggaaaaaagaggccggtagagcactctcctgtggagccagactcctcctcgggaaccggaaaggcgggccatcagcctgcgagaaagagattgaattttggtcagactggagacgcagactccgtacctgacccccagcctctcggacagccaccagcagcccccacaagtctgggatctactacaatggctacaggcagtggcgcaccaatggcagacaataacgagggtgccgatggagtgggtaattcctcaggaaattggcattgcgattcccaatggctgggcgacagagtcatcaccaccagcacccgaacctgggccctgcccacctacaacaaccacctctacaagcaaatctccagccaatcaggagcctcgaacgacaaccactactttggctacagcaccccctgggggtattttgacttcaacagattccactgtcacttctccccacgtgattggcaaagactcatcaacaacaactggggattccgacccaagagactcaacttcaagctctttaacattcaagtcaaagaggtcacgcagaatgacggtacgacgacgattgccaataaccttaccagcacggttcaggtgtttactgactcggagtaccagctcccgtacgtcctcggctcggcgcatcaaggatgcctcccgccgtttccagcggacgtcttcacggtcccacagtatggatacctcaccctgaacaacgggagtcaggcggtaggacgctcttccttttactgcctggagtactttccttctcagatgctgcgtactggaaacaaccttaccttcagctacacctttgaggacgttcctttccacagcagctacgctcacagccagagtttggaccggctgatgaatcctctgatcgaccagtatctatattatctgaacaggacacaatcaaatagtggaactcttcagcagtctaggctactgtttagccaagctggacccaccagcatgtctcttcaagctaaaaactggctgcctggaccttgctacagacagcagcgtctttcaaagcaggcaaacgacaacaacaacagcaactttccctggactgcggctacaaagtatcatctaaatggccgggactcgttggttaatccaggaccagctatggccagccacaaagacgatgaagaaaagtttttccccatgcatggaaccctgatatttggtaaacaaggaacaaatgctaacgacgcggatttggagcatgttatgattacagatgaagaagaaatcaggaccaccaatcctgtggctacagagcagtacggaaacgtgtcaaataatttgcaaaactcaaatactggtccaactacagaaaatgtcaatcaccagggagcgttacctggtatggtgtggcaggatcgagacgtgtacctgcagggacccatttgggccaagattcctcacaccgacggacactttcacccttctccactgatgggaggttttggactcaaacacccgcctcctcaaatcatgatcaaaaacactcccgttccagccaatcctcccacaaactacagttctgccaagtttgcttctttcatcacacagtattccacgggccaggtcagcgtggagattgagtgggagctgcggaaggagaacagcaaacgctggaaccccgagatccagtatacttccaactacaacaaatctgttaatgtggactttactgtggacactaatggtgtgtattcagagcctcgccccattggcaccagatacctgactcgtaatctgtaa

SEQ ID NO: 182 - protein, 735 aa, Adeno-associated virus
MAADGYLPDWLEDTLSEGIRQWWKLKPGPPPPKLAERHQDDSRGLVLPGYKYLGPFNGLDKGEPVNEADAAALEHDKAYDRQLDSGDNPYLKYNHADAEFQERLKEDTSFGGNLGRAVFQAKKRVLEPLGLVEEPVKTAPGKKRPVEHSPVEPDSSSGTGKAGHQPARKRLNFGQTGDADSVPDPQPLGQPPAAPTSLGSTTMATGSGAPMADNNEGADGVGNSSGNWHCDSQWLGDRVITTSTRTWALPTYNNHLYKQISSQSGASNDNHYFGYSTPWGYFDFNRFHCHFSPRDWQRLINNNWGFRPKRLNFKLFNIQVKEVTQNDGTTTIANNLTSTVQVFTDSEYQLPYVLGSAHQGCLPPFPADVFTVPQYGYLTLNNGSQAVGRSSFYCLEYFPSQMLRTGNNLTFSYTFEDVPFHSSYAHSQSLDRLMNPLIDQYLYYLNRTQSNSGTLQQSRLLFSQAGPTSMSLQAKNWLPGPCYRQQRLSKQANDNNNSNFPWTAATKYHLNGRDSLVNPGPAMASHKDDEEKFFPMHGTLIFGKQGTNANDADLEHVMITDEEEIRTTNPVATEQYGNVSNNLQNSNTGPTTENVNHQGALPGMVWQDRDVYLQGPIWAKIPHTDGHFHPSPLMGGFGLKHPPPQIMIKNTPVPANPPTNYSSAKFASFITQYSTGQVSVEIEWELRKENSKRWNPEIQYTSNYNKSVNVDFTVDTNGVYSEPRPIGTRYLTRNL

SEQ ID NO: 183 - DNA, 2208 bp, Adeno-associated virus
atggctgccgatggttatcttccagattggctcgaggacactctctctgaaggaataagacagtggtggaagctcaaacctggcccaccaccaccaaagcccgcagagcggcatcaggacgacagcaggggtcttgtgcttcctgggtacaagtacctcggacccttcaacggactcgacaaaggagagccggtcaacgaggcagacgccgcggccctcgagcacgacaaggcctacgaccggcagctcgacagcggagacaacccgtacctcaagtacaaccacgccgacgcggagtttcaggagcgtcttaaagaagatacgtcttttgggggcaacctcggacgagcagtcttccaggcgaaaaagagggttcttgaacctctgggcctggttgaggaacctgttaagacggctccgggaaaaaagaggccggtagagcactctcctgtggagccagactcctcctcgggaaccggaaaagcgggccatcagcctgcgagaaagagattgaattttggtcagactggagacgcagactccgtacctgacccccagcctctcggacagccaccagcagcccccacaagtttgggatctactacaatggctacaggcagtggcgcaccaatggcagacaataacgagggtgccgatggagtgggtaattcctcaggaaattggcattgcgattcccaatggctgggcgacagagtcatcaccaccagcacccgaacctgggccctgcccacctacaacaaccacctctacaagcaaatctccagccaatcaggagcctcgaacgacaaccactactttggctacagcaccccctgggggtattttgacttcaacagattccactgtcacttctccccacgtgattggcaaagactcatcaacaacaactggggattccgacccaagagactcaacttcaagctctttaacattcaagtcaaggaggtcacgcagaatgacggtacgacgacgattgccaataaccttaccagcacggttcaggtgtttactgactcggagtaccagctcccgtacgtcctcggctcggcgcatcaaggatgcctcccgccgtttccagcggacgtcttcatggtcccacagtatggatacctcaccctgaacaacgggagtcaggcggtaggacgctcttccttttactgcctggagtactttccttctcagatgctgcgtactggaaacaactttaccttcagctacacctttgaggacgttcctttccacagcagctacgctcacagccagagtttggaccggctgatgaatcctctgatcgaccagtatctatattatctgaacaggacacaatcaaatagtggaactcttcagcagtctaggctactgtttagccaagctggacccaccagcatgtctcttcaagctaaaaactggctgcctggaccttgctacagacagcagcgtctttcaaagcaggcaaacgacaacaacaacagcaactttccctggactgcggctacaaagtatcgtctaaatggccgggactcgttggttaatccaggaccagctatggccagccacaaagacgatgaagaaaagtttttccccatgcatggaaccctgatatttggtaaacaaggaacaaatgctaacgacgcggatttggagcatgttatgattacagatgaagaagaaatcaggaccaccaatcctgtggctacagagcagtacggaaacgtgtcaaataatttgcaaaactcaaatactggtccaactacagaaaatgtcaatcaccagggagcgttacctggtatggtgtggcaggatcgagacgtgtacctgcagggacccatttgggccaagattcctcacaccgacggacactttcacccttctccactgatgggaggttttggactcaaacacccgcctcctcaaatcatgatcaaaaacactcccgttccagccaatcctcccacaaacttcagttctgccaagtttgcttctttcatcacacagtattccacgggccaggtcagcgtggagattgagtgggagctgcagaaggagaacagcaaacgctggaaccccgagatccagtatacttccaactacaacaaatctgttaatgtggactttactgtggacactaatggtgtgtattcagagcctcgccccattggcaccagatacctgactcgtaatctgtaa

SEQ ID NO: 184 - protein, 735 aa, Adeno-associated virus
MAADGYLPDWLEDTLSEGIRQWWKLKPGPPPPKPAERHQDDSRGLVLPGYKYLGPFNGLDKGEPVNEADAAALEHDKAYDRQLDSGDNPYLKYNHADAEFQERLKEDTSFGGNLGRAVFQAKKRVLEPLGLVEEPVKTAPGKKRPVEHSPVEPDSSSGTGKAGHQPARKRLNFGQTGDADSVPDPQPLGQPPAAPTSLGSTTMATGSGAPMADNNEGADGVGNSSGNWHCDSQWLGDRVITTSTRTWALPTYNNHLYKQISSQSGASNDNHYFGYSTPWGYFDFNRFHCHFSPRDWQRLINNNWGFRPKRLNFKLFNIQVKEVTQNDGTTTIANNLTSTVQVFTDSEYQLPYVLGSAHQGCLPPFPADVFMVPQYGYLTLNNGSQAVGRSSFYCLEYFPSQMLRTGNNFTFSYTFEDVPFHSSYAHSQSLDRLMNPLIDQYLYYLNRTQSNSGTLQQSRLLFSQAGPTSMSLQAKNWLPGPCYRQQRLSKQANDNNNSNFPWTAATKYRLNGRDSLVNPGPAMASHKDDEEKFFPMHGTLIFGKQGTNANDADLEHVMITDEEEIRTTNPVATEQYGNVSNNLQNSNTGPTTENVNHQGALPGMVWQDRDVYLQGPIWAKIPHTDGHFHPSPLMGGFGLKHPPPQIMIKNTPVPANPPTNFSSAKFASFITQYSTGQVSVEIEWELQKENSKRWNPEIQYTSNYNKSVNVDFTVDTNGVYSEPRPIGTRYLTRNL

SEQ ID NO: 185 - DNA, 2208 bp, Adeno-associated virus
atggctgccgatggttatcttccagattggctcgaggacactctctctgaaggaataagacagtggtggaagctcaaacctggcccaccaccaccaaagcccgcagagcggcatcaggacgacagcaggggtcttgtgcttcctgggtacaagtacctcggacccttcaacggactcgacaaaggagagccggtcaacgaggcagacgccgcggccctcgagcacgacaaggcctacgaccggcagctcgacagcggagacaacccgtacctcaagtacaaccacgccgacgcggagtttcaggagcgtcttaaagaagatacgtcttttgggggcaacctcggacgagcagtcttccaggcgaaaaagagggttcttgaacctctgggcctggttgaggaacctgttaagacggctccgggaaaaaagaggccggtagagcactctcctgtggagccagactcctcctcgggaaccggaaaagcgggccatcagcctgcgagaaagagattgaattttggtcagactggagacgcagactccgtacctgacccccagcctctcggacagccaccagcagcccccacaagtttgggatctactacaatggctacaggcagtggcgcaccaatggcagacaataacgagggtgccgatggagtgggtaattcctcaggaaattggcattgcgattcccaatggctgggcgacagagtcatcaccaccagcacccgaacctgggccctgcccacctacaacaaccacctctacaagcaaatctccagccaatcaggagcctcgaacgacaaccactactttggctacagcaccccctgggggtattttgacttcaacagattccactgtcacttctccccacgtgattggcaaagactcatcaacaacaactggggattccgacccaagagactcaacttcaagctctttaacattcaagtcaaagaggtcacgcagaatgacggtacgacgacgattgccaataaccttaccagcacggttcaggtgtttactgactcggagtaccagctcccgtacgtcctcggctcggcgcatcaaggatgcctcccgccgtttccagcggacgtcttcatggtcccacagtatggatacctcaccctgaacaacgggagtcaggcggtaggacgcccttccttttactgcctggagtactttccttctcagatgctgcgtactggaaacaactttaccttcagctacacctttgaggacgttcctttccacagcagctacgctcacagccagagtttggaccggctgatgaatcctctgatcgaccagtatctatattatctgaacaggacacaatcaaatagtggaactcttcagcagtctaggctactgtttagccaagctggacccaccagcatgtctcttcaagctaaaaactggctgcctggaccttgctacagacagcagcgtctttcaaagcaggcaaacgacaacaacaacagcaactttccctggactgcggctacaaagtatcatctaaatggccgggactcgttggttaatccaggaccagctatggccagccacaaagacgatgaagaaaagtttttccccatgcatgggaccctgatatttggtaaacaaggaacaaatgctaacgacgcggatttggagcatgttatgattacagatgaagaagaaatcaggaccaccaatcctgtggctacagagcagtacggaaacgtgtcaaataatttgcaaaactcaaatactggtccaactacagaaaatgtcaatcaccagggagcgttacctggtatggtgtggcaggatcgagacgtgtacctgcagggacccatttgggccaagattcctcacaccgacggacactttcacccttctccactgatgggaggttttggactcaaacacccgcctcctcaaatcatgatcaaaaacactcccgttccagccaatcctcccacaaacttcagttctgccaagtttgcttctttcatcacacagtattccacgggccaggtcagcgtggagattgagtgggagctgcagaaggagaacagcaaacgctggaaccccgagatccagtatacttccaactacaacaaatctgttaatgtggactttactgtggacactaatggtgtgtattcagagcctcgccccattggcaccagatacctgactcgtaatctgtaa

SEQ ID NO: 186 - protein, 735 aa, Adeno-associated virus
MAADGYLPDWLEDTLSEGIRQWWKLKPGPPPPKPAERHQDDSRGLVLPGYKYLGPFNGLDKGEPVNEADAAALEHDKAYDRQLDSGDNPYLKYNHADAEFQERLKEDTSFGGNLGRAVFQAKKRVLEPLGLVEEPVKTAPGKKRPVEHSPVEPDSSSGTGKAGHQPARKRLNFGQTGDADSVPDPQPLGQPPAAPTSLGSTTMATGSGAPMADNNEGADGVGNSSGNWHCDSQWLGDRVITTSTRTWALPTYNNHLYKQISSQSGASNDNHYFGYSTPWGYFDFNRFHCHFSPRDWQRLINNNWGFRPKRLNFKLFNIQVKEVTQNDGTTTIANNLTSTVQVFTDSEYQLPYVLGSAHQGCLPPFPADVFMVPQYGYLTLNNGSQAVGRPSFYCLEYFPSQMLRTGNNFTFSYTFEDVPFHSSYAHSQSLDRLMNPLIDQYLYYLNRTQSNSGTLQQSRLLFSQAGPTSMSLQAKNWLPGPCYRQQRLSKQANDNNNSNFPWTAATKYHLNGRDSLVNPGPAMASHKDDEEKFFPMHGTLIFGKQGTNANDADLEHVMITDEEEIRTTNPVATEQYGNVSNNLQNSNTGPTTENVNHQGALPGMVWQDRDVYLQGPIWAKIPHTDGHFHPSPLMGGFGLKHPPPQIMIKNTPVPANPPTNFSSAKFASFITQYSTGQVSVEIEWELQKENSKRWNPEIQYTSNYNKSVNVDFTVDTNGVYSEPRPIGTRYLTRNL

SEQ ID NO: 187 - DNA, 2208 bp, Adeno-associated virus
atggctgccgatggttatcttccagattggctcgaggacactctctctgaaggaataagacagtggtggaagctcaaacctggcccaccaccaccaaagcccgcagagcggcataaggacgacagcaggggtcttgtgcttcctgggtacaagtacctcggacccttcaacggactcgacaagggagagccggtcaacgaggcagacgccgcggccctcgagcacgacaaggcctacgaccggcagctcgacagcggagacaacccgtacctcaagtacaaccacgccgacgcggagtttcaggagcgccttaaagaagatacgtcttttgggggcaacctcggacgagcagtcttccaggcaaaaaagagggttcttgaacctctgggcctggttgaggagcctgttaaaacggctccgggaaaaaagaggccggtagagcactctcctgcggagccagactcctcctcgggaaccggaaaagcgggccagcagcctgcaagaaaaagattgaatttcggtcagactggagacgcagactccgtacctgacccccagcctctcggacagccaccagcagccccctctggtctgggaactaatacgatggcttcaggcagtggcgcaccaatggcagacaataacgagggcgccgacggagtgggtaattcctcgggaaattggcattgcgattccacatggatgggcgacagagtcatcaccaccagcacccgaacttgggccctgcccacctacaacaaccatctctacaagcaaatctccagccaatcaggagccagcaacgacaaccactactttggctacagcaccccttgggggtattttgacttcaacagattccactgccacttttcaccacgtgactggcaaagactcatcaacaacaactggggattccggcccaagagactcaacttcaagctctttaacattcaagtcaaagaggtcacgcagaatgacggtacgacgacgattgccaataaccttaccagcacggttcaggtgtttactgactcggagtaccagctcccgtacgtcctcggctcggcgcatcaaggatgcctcccgccgttcccagcagacgtcttcatggtgccacagtatggatacctcaccctgaacaacgggagtcaggcagtaggacgctcttcattttactgcctggagtactttccttctcagatgctgcgtaccggaaacaactttaccttcagctacacctttgaggacgttcctttccacagcagctacgctcacagccagagtttggaccgtctcatgaatcctctcatcgaccagtacctgtattacttgagcagaacaaacactccaagcggaaccaccacgcagtccaggcttcagttttctcaggccggagcaagtgacattcgggaccagtctaggaactggcttcctggaccctgttaccgccagcagcgagtatcaaagacatctgcggataacaacaacagtgaatactcgtggactggagctaccaagtaccacctcaatggcagagactctctggtgaatccgggcccggccatggccagccacaaggacgatgaagaaaagttttttcctcagagcggggttctcatctttgggaagcaaggctcagagaaaacaaatgtggacattgaaaaggtcatgattacagacgaagaggaaatcaggaccaccaatcccgtggctacggagcagtatggttctgtatctaccaacctgcagggcggcaacacacaagcagctaccgcagatgtcaacacacaaggcgttcttccaggcatggtctggcaggacagagacgtgtacctgcaggggcccatctgggcaaagattccacacacggacggacattttcacccctctcccctcatgggcggattcggacttaaacaccctcctccacagattctcatcaagaacaccccggtacctgcgaatccttcgaccaccttcagtgcggcaaagtttgcttctttcatcacacagtattccacggggcaggtcagcgtggagatcgagtgggagctgcagaaggagaacagcaaacgctggaatcccgagatccagtacacttccaactacaacaaatctgttaatgtggactttactgttgacactaatggcgtgtattcagagcctcgccccattggcaccagatacctgactcgtaatctgtaa

SEQ ID NO: 188 - protein, 735 aa, Adeno-associated virus
MAADGYLPDWLEDTLSEGIRQWWKLKPGPPPPKPAERHKDDSRGLVLPGYKYLGPFNGLDKGEPVNEADAAALEHDKAYDRQLDSGDNPYLKYNHADAEFQERLKEDTSFGGNLGRAVFQAKKRVLEPLGLVEEPVKTAPGKKRPVEHSPAEPDSSSGTGKAGQQPARKRLNFGQTGDADSVPDPQPLGQPPAAPSGLGTNTMASGSGAPMADNNEGADGVGNSSGNWHCDSTWMGDRVITTSTRTWALPTYNNHLYKQISSQSGASNDNHYFGYSTPWGYFDFNRFHCHFSPRDWQRLINNNWGFRPKRLNFKLFNIQVKEVTQNDGTTTIANNLTSTVQVFTDSEYQLPYVLGSAHQGCLPPFPADVFMVPQYGYLTLNNGSQAVGRSSFYCLEYFPSQMLRTGNNFTFSYTFEDVPFHSSYAHSQSLDRLMNPLIDQYLYYLSRTNTPSGTTTQSRLQFSQAGASDIRDQSRNWLPGPCYRQQRVSKTSADNNNSEYSWTGATKYHLNGRDSLVNPGPAMASHKDDEEKFFPQSGVLIFGKQGSEKTNVDIEKVMITDEEEIRTTNPVATEQYGSVSTNLQGGNTQAATADVNTQGVLPGMVWQDRDVYLQGPIWAKIPHTDGHFHPSPLMGGFGLKHPPPQILIKNTPVPANPSTTFSAAKFASFITQYSTGQVSVEIEWELQKENSKRWNPEIQYTSNYNKSVNVDFTVDTNGVYSEPRPIGTRYLTRNL

SEQ ID NO: 189 - DNA, 3161 bp, Adeno-associated virus
gattgaatttagcggccgcgaattcgcccttgctgcgtcaactggaccaatgagaactttccattcaatgattgcgtcgacaagatggtgatctggtgggaggagggaaagatgaccgccaaggtcatggagtcggccaaagccattctcggaggaagcaaggtgcgcgtggaccagaaatgtaagtcctcggcccagatagacccgactcccgtgattgtcacctccaacaccaacatgtgcgccgtgattgacgggaactcaacgaccttcgagcaccagcagccgttgcaagaccggatgttcaaatttgaactcacccgccgtctggatcatgactttgggaaggtcaccaagcaggaagtcaaagactttttccggtgggcaaaggatcacgtggttgaggtggagcatgaattctacgtcaaaaagggtggagccaagaaaagacccgcccccagtgacgcagatataagtgagcccaaacgggcgcgcgggtcagttgcgcagccatcgacgtcagacgcggaagcttcgatcaactacgcggacaggtaccaaaacaaatgttctcgtcacgtgggcatgaatctgatgctgtttccctgcagacaatgcgagagaatgaatcaaaattcaaatatctgcttcactcacggacagaaggactgtttagagtgctttcccgtgtcagaatctcaacccgtttctgtcgtcaaaaaggcgtatcagaaactttgctacattcatcatatcatgggaaaggtgccagacgcttgcactgcctgcgatctggtcaatgtggatttggatgactgcatctctgaacaataaatgatttaaatcaggtatggctgccgatggttatcttccagattggctcaaggacactctctctgaaggaataagacagtggtggaagctcaaacctggcccaccaccaccaaagcccgcagagcggcataaggacgacagcgggggtcttgtgcttcctgggtacaagtacctcggacccttcaacggactcgacaagggagagccggtcaacgaggcagacgccgcggccctcgagtacgacaaggcctacgaccggcagctcgacagcggagacaacccgtacctcaagtacaaccacgccgacgcggagtttcaggagcgccttaaagaagatacgtcttttgggggcaacctcggacgagcagtcttccaggcgaaaaagagggttcttgaacctctgggcctggttgaggaacctgttaagacggctccgggaaaaaagaggccggtagagcactctcctgtggagccagactcctcctcgggaacaggaaaagcgggccagcagcctgcgagaaagagattgaattttggtcagactggagacgcagactccgtacctgacccccagcctctcggacagccaccagcagccccctctggtctgggaactaatacgatggctacaggcagtggcgcaccaatggcagacaataacgagggcgccgacggagtgggtaattcctcgggaagttggcattgcgattccacatggatgggcgacagagtcatcaccaccagcacccgaacctgggctctgcccacctacaacaaccatctgtacaagcagatctccagccaatcaggagccagcaacgacaaccactactttggctacagcaccccttgggggtattttgacttcaacagattccactgccacttttcaccacgtgactggcaaagactcatcaacaacaactggggattccggcccaagagactcaacttcaagctctttaacattcaagtcaaggaggtcacgcagaatgacggtacgacgacgattgccaataaccttaccagcacggttcaggtgtttactgactcggagtaccagctcccgtacgtccccggctcggcgcatcaaggatgcctcccgccgttcccagcagacgtcttcatggtgccacagtatggatacctcaccctgaacaacgggagtcaggcagtaggacgctcttcattttactgcctggagtactttccttctcagatgcttcgtaccggaaacaactttaccttcagctacacctttgaggatgttcctttccacagcagctacgctcacagccagagtttggaccgtctcatgaatcctctcatcgaccagtacctgtattacttgagcagaacaaacactccaagcggaaccaccacgcagtccaggcttcagttttctcaggccggagcaagtgacattcgggaccagtctaggaactggcttcctggaccctgttaccgccagcagcgagtatcaaagacagctgcggacaacaacaacagtgaatactcgtggactggagctaccaagtaccacctcaatggcagagactctctggtgaatccgggcccggccatggccagccacaaggacgatgaagaaaagttttttcctcaaagcggggttctcatctttgggaagcaaggctcagagaaaacaaatgtggacattgaaaaggtcatgattacagacgaagaggaaatcagaaccaccaatcccgtggccacggagcagtatggttctgtatctaccaacctccagagcggcaacacacaagcagctactgcagatgtcaacacacaaggcgttcttccaggcatggtctggcaggacagagacgtgcacctgcaggggcctatctgggcaaagattccacacacggacggacattttcacccctctcccctcatgggcggatttggacttaaacaccctcctccacagattctcatcaagaacaccccggtacctgcaaatccttcgaccaccttcagtgcggcaaagtttgcttccttcatcacacagtattccacagggcaggtcagcgtggagatcgagtgggagctgcagaaggagaacagcaaacgctggaaccccgagatccagtacacttccaactacaacaaatctgttaatgtggactttactgtggacactaatggtgtgtattcagagcctcgccccattggcaccagatacctgactcgtaatctgtaattgcttgttaatcaataaaccgtttaattcgtttcagttgaactttggtctctgcgaagggcgaattcgtttaaaccctgcaggactagtccctttagtgagg

SEQ ID NO: 190 - DNA, 3162 bp, Adeno-associated virus
gaattgaatttagcggccgcgaattcgcccttcgcagagaccaaagttcaactgaaacgaattaaacggtttattgattaacaagcaattacagattacgagtcaggtatctggtgccaatggggcgaggctctgaatacacgccattagtgtccacagtaaagtccacattaacagacttgttgtagttggaagtgtactgaatttcgggattccagcgtttgctgttttccttctgcagctcccactcgatctccacgctgacctgtcccgtggagtactgtgtgatgaaggaagcaaactttgccgcactgaaggtggtcgaaggattcgcaggtaccggggtgttcttgatgagaatctgtggaggagggtgtttaagtccgaatccacccatgaggggagaggggtgaaaatgtccgtccgtgtgtggaatctttgcccagatgggcccctgaaggtacacatctctgtcctgccagaccatgcctggaagaacgccttgtgtgttgacatctgcggtagctgcttgtctgttgcctctctggaggttggtagatacagaaccgtactgctccgtagccacgggattggttgtcctgatttcctcttcgtctgtaatcatgaccttttcaatgtccacatttgttttctctgagccttgcttcccaaagatgagaaccccgctctgaggaaaaaacttttcttcattgtccttgtggcttgccatggccgggcccggattcaccagagagtctctgccattgaggtggtacttggtagctccagtccacgagtattcactgttgttgttatccgcagatgtctttgatactcgctgctggcggtaacagggtccaggaagccagttcctagactggtcccgaatgtcactcgctccggcctgagaaaactgaagccttgactgcgtggtggttccacttggagtgtttgttgtgctcaagtaatacaggtactggtcgatgagaggattcatgagacggtccagactctggctgtgagcgtagccgctgtggaaaggaacgtcctcaaaagtgtagctgaaggtaaagttgtttccggtacgcagcatctgagaaggaaagtactccaggcagtaaaatgaagagcgtcctactgcctgactcccgttgttcagggtgaggtatccatactgtggcaccatgaagacgtctgctgggaacggcgggaggcatccttgatgcgccgagccgaggacgtacgggagctggtactccgagtcagtaaacacctgaaccgtgctggtaaggttattggcaatcgtcgtcgtaccgtcattctgcgtgacctctttgacttgaatgttaaagagcttgaagttgagtctcttgggtcggaatccccagttgttgttgatgagtctttgccagtcacgtggtgaaaagtggcagtggaatctgttgaagtcaaaatacccccaaggggtgctgtagccaaagtagtgattgtcgttcgaggctcctgattggctggaaatttgtttgtagaggtggttgttgtaggtgggcagggcccaggttcgggtgctggtggtgatgactctgtcgcccatccatgtggaatcgcaatgccaatttcccgaggaattacccactccgtcggcgccctcgttattgtctgccattggtgcgccactgcctgtagccatcgtattagttcccagaccagagggggctgctggtggctgtccgagaggctgggggtcaggtactgagtctgcgtctccagtctgaccaaaattcaatctttttcttgcaggctgctggcccgcctttccggttcccgaggaggagtctggctccacaggagagtgctctaccggcctcttttttcctggagccgtcttgacaggttccccaaccaggcccagaggttcaagaaccctctttttcgcctggaagactgctcgtccgaggttgcccccaaaagacgtatcttctttaaggcgctcctgaaactccgcgtcggcgtggttgtacttgaggtacgggttgtctccgctgtcgagctgccggtcgtaggctttgtcgtgctcgagggccgcggcgtctgcctcgttgaccggctctcccttgtcgagtccgttgaagggtccgaggtacttgtacccaggaagcacaagacccctgctgtcgtccttatgccgctctgcgggctttggtggtggtgggccaggtttgagcttccaccactgtcttattccttcagagagagtgtcctcgagccaatctggaagataaccatcggcagccatacctgatttaaatcatttattgttcaaagatgcagtcatccaaatccacattgaccagatcgcaggcagtgcaagcgtctggcacctttcccatgatatgatgaatgtagcacagtttctgatacgcctttttgacgacagaaacgggttgagattctgacacgggaaagcactctaaacagtctttctgtccgtgagtgaagcagatatttgaattctgattcattctctcgcattgtctgcagggaaacagcatcagattcatgcccacgtgacgagaacatttgttttggtacctgtctgcgtagttgatcgaagcttccgcgtctgacgtcgatggctgcgcaactgactcgcgcacccgtttgggctcacttatatctgcgtcactgggggcgggtcttttcttggctccaccctttttgacgtagaattcatgctccacctcaaccacgtgatcctttgcccaccggaaaaagtctttgacttcctgcttggtgaccttcccaaagtcatgatccagacggcgggtgagttcaaatttgaacatccggtcttgcaacggctgctggtgttcgaaggtcgttgagttcccgtcaatcacggcgcacatgttggtgttggaggtgacgatcacgggagtcgggtctatctgggccgaggacttgcatttctggtccacgcgcaccttgcttcctccgagaatggctttggccgactccacgaccttggcggtcatcttcccctcctcccaccagatcaccatcttgtcgacacagtcgttgaagggaaagttctcattggtccagttgacgcagcaagggcgaattcgtttaaacctgcaggactagtccctttagtgaggg

SEQ ID NO: 191 - DNA, 3164 bp, Adeno-associated virus
gcgaattgaatttagcggccgcgaattcgcccttcgcagagaccaaagttcaactgaaacgaattaaacggtttattgattaacaagcaattacaaattacgagtcaggtatctggtgccaatggggcgaggctctgaatacacgccattagtgtccacagtaaagtccacattaacagacttgttgtagttggaagtgtactgaatttcgggattccagcgtttgctgttttccttctgcagctcccactcgatctccacgctgacctgtcccgtggagtactgtgtgatgaaggaagcaaactttgccgcactgaaggtggtcgaaggattcgcaggtaccggggtgttcttgatgagaatctgtggaggagggtgtttaggtccgaatccacccatgaggggagaggggtgaaaatgtccgtccgtgtgtggaatctttgcccagatgggcccctgaaggtacacatctctgtcctgccagaccatgcctggaagaacgccttgtgtgttgacatctgcggtagctgcttgtctgttgcctctctggaggttggtagatacagaaccatactgctccgtagccacgggattggttgtcctgatttcctcttcgtctgtaatcatgaccttttcaatgtccacatttgttttctctgagccttgcttcccaaagatgagaaccccgctctgaggaaaaaacttttcttcattgtccttgtggcttgccatggccgggcccggattcaccagagagtctctgccattgaggtggtacttggtagctccagtccacgagtattcactgttgttgttatccgcagatgtctttgatactcgctgctggcggtaacagggtccaggaagccagttcctagactggtcccgaatgtcactcgctccggcctgagaaaactgaagccttgactgcgtggtggttccacttggagtgtttgttgtgctcaagtaatacaggtactggtcgatgagaggattcatgagacggtccagactctggctgtgagcgtagctgctgtggaaaggaacgtcctcaaaagtgtagctgaaggtaaagttgtttccggtacgcagcatctgagaaggaaagtactccgggcagtaaaatgaagagcgtcctactgcctgactcccgttgctcagggtgaggtatccatactgtggcaccatgaagacgtctgctgggaacggcgggaggcatccttgatgcgccgagccgaggacgtacgggagctggtactccgagtcagtaaacacctgaaccgtgctggtaaggttattggcaatcgtcgtcgtaccgtcattctgcgtgacctctttgacttgaatgttaaagagcttgaagttgagtctcttgggtcggaatccccagttgttgttgatgagtctttgccagtcacgtggtgaaaagtggcagtggaatctgttgaagtcaaaatacccccaaggggtgctgtagccaaagtagtgattgtcgttcgaggctcctgattggctggaaatttgtctgtagaggtggttgttgtaggtgggcagggcccaggttcgggtgctggtggtgatgactctgtcgcccatccatgtggaatcgcaatgccgatttcccgaggaattacccactccgtcggcgccctcgttattgtctgccattggtgcgccactgcctgtagccatcgtattagttcccagaccagagggggctgctggtggctgtccgagaggctgggggtcaggtactgagtctgcgtctccagtctgaccaaaattcaatctttttcttgcaggctgctggcccgcctttccggttcccgaggaggagtctggctccacaggagagtgctctaccggcctcttttttcccggagccgtcttaacaggttccccaaccaggcccagaggttcaagaaccctctttttcgcctggaagactgctcgtccgaggttgcccccaaaagacgtatcttctttaaggcgctcctgaaactccgcgtcggcgtggttgtacttgaggtacgggttgtctccgctgtcgagctgccggtcgtaggctttgtcgtgctcgagggccgcggcgtctgcctcgttgaccggctctcccttgtcgagtccgttgaagggtccgaggtacttgtacccaggaagcacaagacccctgctgtcgtccttatgccgctctgcgggctttggtggtggtgggccaggtttgagcttccaccactgtcttattccttcagagagagtgtcctcgagccaatctggaagataaccatcggcagccatacctgatttaaatcatttattgttcaaagatgcagtcatccaaatccacattgaccagatcgcaggcagtgcaagcgtctggcacctttcccatgatatgatgaatgtagcacagtttctgatacgcctttttgacgacagaaacgggttgagattctgacacgggaaagcactctaaacagtctttctgtccgtgagtgaagcagatatttgaattctgattcattctctcgcattgtctgcagggaaacagcatcagattcatgcccacgtgacgagaacatttgttttggtacctgtctgcgtagttgatcgaagcttccgcgtctgacgtcgatggctgcgcaactgactcgcgcacccgtttgggcccacttatatctgcgtcactgggggcgggtcttttcttggctccaccctttttgacgtagaattcatgctccacctcaaccacgtgatcctttgcccaccggaaaaagtctttgacttcctgcttggtgaccttcccaaagtcatgatccagacggcgggtgagttcaaatttgaacatccggtcttgcaacggctgctggtgttcgaaggtcgttgagttcccgtcaatcacggcgcacatgttggtgttggaggtgacgatcacgggagtcgggtctatctgggccgaggacttgcatttctggtccacgcgcaccttgcttcctccgagaatggctttggccgactccacgaccttggcggtcatcttcccctcctcccaccagatcaccatcttgtcgacacagtcgttgaagggaaagttctcattggtccagttgacgcagcaagggcgaattcgtttaaacctgcaggactagtccctttagtgaggg

SEQ ID NO: 192 - DNA, 3163 bp, Adeno-associated virus
accctcactaaagggactagtcctgcaggtttaaacgaattcgcccttgctgcgtcaactggagcaatgagaactttcccttcaacgactgtgtcgacaagatggtgatttggtgggaggaggggaagatgaccgccaaggtcgtggagtcggccaaagccattctcggaggaagcaaggtgcgcgtggaccagaaatgcaagtcctcggcccagatagatccgactcccgtgatcgtcacctccaacaccaacatgtgcgccgtgattgacgggaactcaacgaccttcgaacaccagcagccgttgcaagaccggatgttcaaatttgaactcacccgccgtctggatcatgactttgggaaggtcaccaagcaggaagtcaaagactttttccggtgggcaaaggatcacgtggttgaggtggagcatggattctacgtcaaaaagggtggagccaagaaaagacccgcccctagtgacgcagatataagtgagcccaaacgggtgcgcgagtcagttgcgcagccatcgacgtcggacgcggaagcttcgatcaactacgcggacaggtaccaaaacaaatgttctcgtcacgtgggcatgaatctgatgctgtttccctgcagacaatgcgagagaatgaatcaaaattcaaatatctgcttcactcacggacagaaagactgtttagagtgctttcccgtgtcagaatctcaacctgtttctgtcgtcaaaaaggcgtatcagaaactgcgctacattcatcatatcatgggaaaggtgccagacgcttgcactgcctgcgatctggtcaatgtggatttggatgactgcatctctgaacaataaatgatttaaatcaggtatggctgccgatggttatcttccagattggctcgaggacactctctctgaaggaataagacagtggtggaagctcaaacctggcccaccaccaccaaagcccgcagagcggcataaggacgacagcaggggtcttgtgcttcctgggtacaagtacctcggacccttcaacggactcgacaagggagagccggtcaacgaggcagacgccgcggccctcgagcacgacaaggcctacgaccggcagctcgacagcggagacaacccgtacctcaagtacaaccacgccgacgcggagtttcaggagcgtcttaaagaagatacgtcttttgggggcaacctcggacgagcagtcttccaggcgaaaaagagggttcttgaacctctgggcctggttgaggaacctgttaagacggctccgggaaaaaagaggccggtagagcactctcctgcggagccagactcctcctcgggaaccggaaaagcgggccagcagcctgcaagaaaaagactgaatttcggtcagactggagacgcagactccgtacctgacccccagcctctcggacagccaccagcagcccccacaagtttgggatctactacaatggctacaggcagtggcgcaccaatggcagacaataacgagggtgccgatggagtgggtaattcctcaggaaattggcattgcgattcccaatggctgggcgacagagtcatcaccaccagcacccgaacctgggccctgcccacctacaacaaccacctttacaagcaaatctccagccaatcaggagcctcaaacgacaaccactactttggctacagcaccccctgggggtattttgacttcaacagattccactgccacttttcaccacgtgactggcaaagactcatcaacaacaactggggattccgacccaagagactcaacttcaagctctttaacattcaagtcaaagaggtcacgcagaatgacggtacgacgacgattgccaataaccttaccagcacggttcaggtgtttactgactcggagtaccagctcccgtacgtcctcggctcggcgcatcaaggatgcctcccgccgtttccagcggacgtcttcatggtcccacagtatggatacctcaccctgaacaacgggagtcaggcggtaggacgctcttccttttactgcctggagtgctttccttctcagatgctgcgtactggaaacaactttcagttcagctacacttttgaagacgtgcctttccacagcagctacgctcacagccagagtttggatcggctgatgaatcctctgatcgaccagtacctgtattatctaaacagaacacaaacagctagtggaactcagcagtctcggctactgtttagccaagctggacccacaagcatgtctcttcaagctaaaaactggctgcctggaccgtgttatcgccagcagcgtttgtcaaagcaggcaaacgacaacaacaacagcaactttccctggactggagctaccaagtaccacctcaatggcagagactctttggtgaacccgggcccggccatggccagccacaaggacgatgaagaaaagtttttccccatgcatggaaccctaatatttggtaaagaaggaacaaatgctaccaacgcggaattggaaaatgtcatgattacagatgaagaggaaatcaggaccaccaatcccgtggctacagagcagtacggatatgtgtcaaataatttgcaaaactcaaatactgctgcaagtactgaaactgtgaatcaccaaggagcattacctggtatggtgtggcaggatcgagacgtgtacctgcagggacccatttgggccaagattcctcacaccgatggacactttcatccttctccactgatgggaggttttggactcaaacacccgcctcctcagattatgatcaaaaacactcccgttccagccaatcctcccacaaacttcagttctgccaagtttgcttccttcatcacacagtattccacgggacaggtcagcgtggagatcgagtgggagctgcagaaggagaacagcaaacgctggaatcccgaaattcagtacacttccaactacaacaaatctgttaatgtggactttactgtggacactaatggtgtgtattcagagcctcgccccattggcaccagatacctgactcgtaatctgtaattgcttgttaatcaataaaccgtttaattcgtttcagttgaactttggtctctgcgaagggcgaattcgcggccgctaaattcaattcgcc

SEQ ID NO: 193 - protein, 735 aa, Adeno-associated virus
MAADGYLPDWLEDTLSEGIRQWWKLKPGPPPPKPAERHKDDSRGLVLPGYKYLGPFNGLYKGEPVDEADAAALEHDKAYDRQLDSGDNPYLKYNHADAEFQERLKEDTSFGGNLGRAVFQAKKRVLEPLGLVGEPVKTAPGKKRPVEHSPVEPDSSSGTGKAGNQPARKRLNFGQTGDADSVPDPQPLGQPPAAPSGLGSTTMATGSGAPVADNNEGADGVGNSSGNWHCDSQWLGDRVITTSTRTWALPTYNNHLYKQISSQSGASNDNHYFGYSTPWGYFDFNRFHCHFSPRDRQRLINNNWGFRPKRLNFKLFNIQVKEVTQNDGTTTIANNLTSTVQVFTDSGYQLPYVLGLAHQGCLPPFPADVFMVPQYGYLTLNNGSQAVGRSSFYCLEYFPSQMLRTGNNFQFSYTFEDVPFHSSYAHSQSLDRLMNPLIDQYLYYLNKTQSNSGTLQQSRLLFSQAGPTSMSLQAKNWLPGPCYRQQRLSKQANDNNNSNFPWTAATKYHLNGRDSLVNPGPAMASHKDDEEKFFPMHGTLIFGKQGTNANDADLDNVMITDEEEIRTTNPVATEQYGYVSNNLQNSNTGPTTGTVNHQGALPGMVWQDRDVYLQGPIWAKIPHTDGHFHPSPLMGGFGLKHPPPQIMIKNTPVPANPPTNFSSAKFASFITQYSTGQVSVEIEWELQKEDSKRWNPEIQYTSNYNKPVNVDFTVDTNGVYSEPRPIGTRYLTRNL

SEQ ID NO: 194 - DNA, 2208 bp, Adeno-associated virus
atggctgccgatggttatcttccagattggctcgaggacactctctctgaaggaataagacagtggtggaagctcaaacctggcccaccaccaccaaagcccgcagagcggcataaggacgacagcaggggtcttgtgcttcctgggtacaagtacctcggacccttcaacggactctacaagggagagccggtcgacgaggcagacgccgcggccctcgagcacgacaaggcctacgaccggcagctcgacagcggagacaacccgtacctcaagtacaaccacgccgacgcggagtttcaggagcgccttaaagaagatacgtcttttgggggcaacctcggacgagcagtcttccaggccaaaaagagggttcttgaacctctgggcttggttggggagcctgttaaaacggctccgggaaaaaagaggccggtagagcactctcctgtggagccagactcctcctcgggaaccggaaaagcgggcaaccagcctgcaagaaaaagattgaattttggtcagactggagacgcagactccgtacctgacccccagcctctcggacagccaccagcagccccctctggtctgggatctactacaatggctacaggcagtggcgcaccagtggcagacaataacgagggtgccgatggagtgggtaattcctcaggaaattggcattgcgattcccaatggctgggcgacagagtcatcaccaccagcacccgaacctgggctctgcccacctacaataaccacctctacaagcaaatctccagccaatcaggagcctcaaacgacaaccactactttggctacagcaccccctgggggtattttgacttcaacagattccactgccacttttcaccacgtgaccggcaaagactcatcaacaacaactggggattccgaccaaaaagactcaacttcaagctctttaacattcaagtcaaagaggtcacgcagaatgacggtacgacgacgattgccaataaccttaccagcacggttcaggtgtttactgactcggggtaccagctcccgtacgtcctcggcttggcgcatcaaggatgcctcccgccgttcccagcagacgtcttcatggtgccacagtatggatacctcaccctgaacaacgggagtcaggcggtaggacgctcttccttttactgcctggagtactttccttctcagatgctgcgtactggaaacaactttcagttcagctacacctttgaagacgttcctttccacagcagctacgctcacagccagagtctggatcggctgatgaatcctctgatcgaccagtacctgtattatctgaacaagacacaatcaaatagtggaactcttcagcagtctcggctactgtttagccaagctggacccaccagcatgtctcttcaagctaaaaactggctgcctggaccttgctacagacagcagcgtctgtcaaagcaggcaaacgacaacaacaacagcaactttccctggactgcggctacaaagtatcatctaaatggccgggactcgttggttaatccaggaccagctatggccagccacaaagacgatgaagaaaagtttttccccatgcatggaaccctgatatttggtaaacaaggaacaaatgctaacgacgcggatttggacaatgtcatgattacagatgaagaagaaatccgcaccaccaatcccgtggctacggagcagtacggatatgtgtcaaataatttgcaaaactcaaatactggtccaactactggaactgtcaatcaccaaggagcgttacctggtatggtgtggcaggatcgagacgtgtacctgcagggacccatttgggccaagattcctcacaccgatggacactttcatccttctccacttatgggaggttttggactcaaacacccacctcctcagatcatgattaaaaacactcccgttccagccaatcctcccacaaacttcagttctgccaagtttgcttctttcatcacacagtattccacgggacaagtcagcgtggagatcgagtgggagctgcagaaggaggacagcaaacgctggaaccccgagatccagtacacttccaactataacaaacctgttaatgtggactttactgtggacactaatggtgtgtattcagagcctcgccccattggcaccagatacctgactcgtaatctgtaa

SEQ ID NO: 195 - DNA, 3161 bp, Adeno-associated virus
cgaattgatttagcggccgcgaattcgcccttcgcagagaccaaagttcaactgaaacgaattaaacggtttattgattaacaagcaattacagattacgagtcaggtatctggtgccaatggggcgaggctctgaatacacaccattagtgtccacagtaaagtccacattaacagatttgttgtagttggaagtgtactggatctcgggattccagcgtttgctgttctccttctgtagctcccactcgatctccacgctgacccgccccgtggaatactgtgtgatgaaggaagcaaactttgccgcactgaaggtggtcgaaggattcgcaggtaccggggtgtttttgatgagaatctgtggaggagggtgtttaagtccgaatccgcccatgaggggagaggggtgaaaatgtccgtccgtgtgcggaatctttgcccagataggcccctgcaggtacacgtctctgtcctgccagaccatgcctggaagaacgccttgtgtgttgacatctgcagtagatgcttgtgtgttgccgctctggaggttggtagatacagaaccatactgctccgtggccacgggattggtggttctgatttcctcttcgtctgtaatcatgaccttttcaatgtccacatttgttttctctgatccttgttttccaaagatgagaaccccgctctgaggaaaaaacttttcttcatcgtccttgtggctggccattgccgggcccggattcaccagagagtctctgccattgaggtggtacttggtagctccaatccacgagtattcactgttgttgttgtccgcagatgtctttgatactcgctgctggcggtaacagggtccaggaagccagttcctagactgatcccgaatgtcactcgctccggcctgagaaaactgaagcctggactgcgtggtggttccgcttggagtgtttgttctgctcaagtaatacaggtactggtcgatgagaggattcatgagacggtccaaactctggctgtgagcgtagctgctgtggaaaggaacatcctcaaaggtgtagctgaaggtaaagttgtttccggtacgcagcatctgagaagggaagtactccaggcagtaaaatgaagagcgtcctactgcctgactcccgttgttcagggtgaggtatccatactgtggcaccatgaagacgtctgctgggaacggcgggaggcatccttgatgcgccgagccgaggacgtacgggagctggtactccgagtcagtaaacacctgaaccgtgctggtaaggttattggcaatcgtcgtcgtaccatcattctgcgtgacctctctgacttgaatgttaaagagcttgaagttgagtctcttgggccggaatccccagttgttgttgatgagtctttgccagtcacgtggtgaaaagtggcagtggaatctgttgaagtcaaaatacccccaaggggtgctgtagccaaagtagtggttgtcgttgctggctcctgattggctggaaatctgcttgtacagatggttgttgtaggtgggcagagcccaggttcgggtgctggtggtgatgactctgtcgcccatccatgtggaatcgcaatgccaatttcccgaggaattacccactccgtcggcgccatcgttattgtctgccattggtgcgccactgcctgtagccatcgtattagttcccagaccagagggggctgctggtggctgtccgagaggctgggggtcaggtacggagtctgcgtctccagtctgaccgaaattcaatctctttcttgcaggctggttgcccgcttttccggttcccgaggaggagtctggctccacaggagagtgctctaccggcctcttttttcccggagccgtcttaacaggctcctcaaccaggcccagaggttcaagaaccctcttttttgcctggaagactgctcgtccgaggttgcccccaaaagacgtatcttctttaaggcgctcctgaaactccgcgtcggcgtggtcgtacttgaggtacgggttgtctccgctgtcgagctgccggtcgtaggccttgtcgtgctcgagggccgcggcgtctgcctcgttgaccggctctcccttgtcgagtccgttgaagggtccgaggtacttgtacccaggaagcacaagacccctgctgtcgtccttatgccgctctgcgggctttggtggtggtgggccaggtttgagcttccaccactgtcttattccttcagagagagtgtcctcgagccaatctggaagataaccatcggcagccatacctgatttaaatcatttattgttcagagatgcagtcatccaaatccacattgaccagatcgcaggcagtgcaagcgtctggcacctttcccatgatatgatgaatgtagcaaagtttctgatacgcctttttgacgacagaaacgggttgagattctgacacgggaaagcactctaaacagtctttctgtccgtgagtgaagcagatatttgaattctgattcattctctcgcattgtctgcagggaaacagcatcagattcatgcccacgtgacgagaacatttgttttggtacctgtccgcgtagttgatcgaagcttccgcgtctgacgtcgatggctgcgcaactgactcgcgcgcccgtttgggctcacttatatctgcgtcactgggggcgggtcttttcttggctccaccctttttgacgtagaattcatgctccacctcaaccacgtgatcctttgcccaccggaaaaagtctttcacttcctgcttggtgaccttcccaaagtcatgatccagacggcgggttagttcaaatttgaacatccggtcttgcaacggctgctggtgttcgaaggtcgttgagttcccgtcaatcacggcgcacatgttggtgttggaggtggcgatcacgggagtcgggtctatctgggccgaggacttgcacttttggtccacgcgcaccttgcttcctccgagaatggcttcggccgattccacgaccttggcggtcatctttccctcctcccaccagatcaccatcttgtcgacacagtcgttgaagggaaagttctcattggtccagttgacgcagcaagggcgaattcgtttaaacctgcaggaactagtcccttagtgagg

SEQ ID NO: 196 - protein, 735 aa, Adeno-associated virus
MAADGYLPDWLEDTLSEGIRQWWKLKPGPPPPKPAERHKDDSRGLVLPGYKYLGPFNGLYKGEPVNEADAAALEHDKAYDRQLDSGDNPYLKYNHAGAEFQERLKEDTSFGGNLGRAVFQAKKRVLEPLGLVEEPVKTAPGKKRPVEHSPVEPDSSSGTGKAGNQPARKRLNFGQTGDADSVPDPQPLGQPPAAPSGLGSTTMATGSGAPVADNNEGADGVGNSSGNWHCDSQWLGDRVITTSTRTWALPTYNNHLYKQISSQSGASNDNHYFGYSTPWGYFDFNRFHCHFSPRDWQRLINNNWGFRPKRLNFKLFNIQVKEVTQNDGTTTIANNLTSTVQVFTDSEYQLPYVLGSAHQGCLPPFPADVFMVPQYGYLTLNNGSQAVGRSSFYCLEYFPSQMLRTGNNFQFSYTFEDVPFHSSYAHSQSLDRLMNPLIDQYLYYLNKTQSNSGTLQQSRLLFSQAGPTSMSLQAKNWLPGPCYRQQRLSKQANDNNNSNFPWTAATKYHLNGRDSLVNPGPAMASHKDDEEKFFPMHGTLIFGKQGTNANDADLDNVMITDEEEIRTTNPVATEQYGYVSNNLQDSNTGPTTGTVNHQGALPGMVWQDRDVYLQGPIWAKIPHTDGHFHPSPLMGGFGLKHPPPQIMIKNTPVPANPPTNFSSAKFASFITQYSTGQVSVEIEWELQKENSKRWNPEIQYTSNYNKSVNVDFTVDTNGVYSEPRPIGTRYLTRNL

SEQ ID NO: 197 - DNA, 2208 bp, Adeno-associated virus
atggctgccgatggttatcttccagattggctcgaggacactctctctgaaggaataagacagtggtggaagctcaaacctggcccaccaccgccaaagcccgcagagcggcataaggacgacagcaggggtcttgtgcttcctgggtacaagtacctcggacccttcaacggactctacaagggagagccggtcaacgaggcagacgccgcggccctcgagcacgacaaggcctacgaccggcagctcgacagcggagacaacccgtacctcaagtacaaccacgccggcgcggagtttcaggagcgccttaaagaagatacgtcttttgggggcaacctcggacgagcagtcttccaggccaaaaagagggttcttgaacctctgggcttggttgaggagcctgttaaaacggctccgggaaaaaagaggccggtagagcactctcctgtggagccagactcctcctcgggaaccggaaaagcgggcaaccagcctgcaagaaaaagattgaattttggtcagactggagacgcagactccgtacctgacccccagcctctcggacagccaccagcagccccctctggtctgggatctactacaatggctacaggcagtggcgcaccagtggcagacaataacgagggtgccgatggagtgggtaattcctcaggaaattggcattgcgattcccaatggctgggcgacagagtcatcaccaccagcacccgaacctgggctctgcccacctacaacaaccacctctacaagcaaatctccagccaatcaggagcctcaaacgacaaccactactttggctacagcaccccctgggggtattttgacttcaacagattccactgccacttttcaccacgtgactggcaaagactcatcaacaacaactggggattccgaccaaagagactcaacttcaagctctttaacattcaagtcaaagaggtcacgcagaatgacggtacgacgacgattgccaataaccttaccagcacggttcaggtgtttactgactcggagtaccagctcccgtacgtcctcggctcggcgcatcaaggatgcctcccgccgttcccagcagacgtcttcatggtgccacagtatggatacctcaccctgaacaacgggagtcaggcggtaggacgctcttccttttactgcctggagtactttccttctcagatgctgcgtactggaaacaactttcagttcagctacacctttgaagacgttcctttccacagcagctacgctcacagccagagtctggatcggctgatgaatcctctgatcgaccagtacctgtattatctgaacaagacacaatcaaatagtggaacccttcagcagtctcggctactgtttagccaagctggacccaccagcatgtctcttcaagctaaaaactggctgcctggaccttgctacagacagcagcgtctgtcaaagcaggcaaacgacaacaacaacagcaactttccctggactgcggctacaaagtatcatctaaatggccgggactcgttggttaatccaggaccagctatggccagccacaaagacgatgaagaaaagtttttccccatgcatggaaccctgatatttggtaaacaaggaacaaatgctaacgacgcggatttggacaatgtcatgattacagatgaagaagaaatccgcaccaccaatcccgtggctacggagcagtacggatatgtgtcaaataatttgcaagactcaaatactggtccaactactggaactgtcaatcaccaaggagcgttacctggtatggtgtggcaggatcgagacgtgtacctgcagggacccatttgggccaagattcctcacaccgatggacactttcatccttctccacttatgggaggttttggactcaaacacccacctcctcagatcatgattaaaaacactcccgttccagccaatcctcccacaaacttcagttctgccaagtttgcttctttcatcacacagtattccacgggacaagtcagcgtagagatcgagtgggagctgcagaaggagaacagcaaacgctggaaccccgagatccagtacacttccaactataacaaatctgttaatgtggactttactgtggacactaatggtgtgtattcagagcctcgccccattggcaccagatacctgactcgtaatctgtaa

SEQ ID NO: 198 - protein, 738 aa, Adeno-associated virus
MAADGYLPDWLEDNLSEGIREWWDLKPGAPKPKANQQKQDDGRGLVLPGCKYLGPFNGLDKGEPVNAADAAALEHDKAYDQQLKAGDNPYLRYNHADAEFQERLQEDTSFGGNLGRAVFQAKKRVLEPLGLVEEGAKTAPGKKRPVEPSPQRSPDSSTGIGKTGQQPAKKRLNFGQTGDSESVPDPQPIGEPPAGPSGLGSGTMAAGGGAPMADNNEGADGVGSSSGNWHCDSTWLGDRVITTSTRTWALPTYNNHLYKQISNGTSGGSTNDNTYFGYSTPWGYFDFNRFHCHFSPRDWQRLINNNWGFRPKRLNFKLFNIQVKEVTQNEGTKTIANNLTSTIQVFTDSEYQLPYVLGSAHQGCPPPFPADVFMIPQYGYLTLNNGSQAVGRSSFYCLEYFPSQMRRTGNNFEFSYQFEDVPFHSSYAHSQSLDRLMNPLIDQYLYYLSRTQSTGGTAGTQQLLFSQAGPNNMSAQAKNWLPGPCYRQQRVSTTLSQNNNSNFAWTGATKYHLNGRDSLVNPGVAMATHKDDEERFFPSSGVLMFGKQGAGKDNVDYSSVMLTSEEEIKTTNPVATEQYGVVADNLQQQNAAPIVGAVNSQGALPGMVWQNRDVYLQGPIWAKIPHTDGNFHPSPLMGGFGLKHPPPQILIKNTPVPADPPTTFSQAKLASFITQYSTGQVSVEIEWELQKENSKRWNPEIQYTSNYNKSVNVDFTVDTNGVYSEPRPIGTRYLTRNL

SEQ ID NO: 199 - DNA, 2217 bp, Adeno-associated virus
atggctgccgatggttatcttccagattggctcgaggacaacctctctgagggcattcgcgagtggtgggacttgaaacctggagccccgaaacccaaagccaaccagcaaaagcaggacgacggccggggtctggtgcttcctggctgcaagtacctcggacccttcaacggactcgacaagggggagcccgtcaacgcggcggacgcagcggccctcgagcacgacaaggcctacgaccagcagctcaaagcgggtgacaatccgtacctgcggtataaccacgccgacgccgagtttcaggagcgtctgcaagaagatacgtcttttgggggcaacctcgggcgagcagtcttccaggccaagaagcgggttctcgaacctctcggtctggttgaggaaggcgctaagacggctcctggaaagaagagaccggtagagccatcaccccagcgttctccagactcctctacgggcatcggcaagacaggccagcagcccgcgaaaaagagactcaactttgggcagactggcgactcagagtcagtgcccgaccctcaaccaatcggagaaccccccgcaggcccctctggtctgggatctggtacaatggctgcaggcggtggcgctccaatggcagacaataacgaaggcgccgacggagtgggtagttcctcaggaaattggcattgcgattccacatggctgggcgacagagtcatcaccaccagcacccgaacctgggccctccccacctacaacaaccacctctacaagcaaatctccaacgggacatcgggaggaagcaccaacgacaacacctacttcggctacagcaccccctgggggtattttgactttaacagattccactgccacttctcaccacgtgactggcagcgactcatcaacaacaactggggattccggcccaagagactcaacttcaagctcttcaacatccaggtcaaggaggtcacgcagaatgaaggcaccaagaccatcgccaataaccttaccagcacgattcaggtctttacggactcggaataccagctcccgtacgtcctcggctctgcgcaccagggctgcccgcctccgttcccggcggacgtcttcatgattcctcagtacgggtacctgactctgaacaacggcagtcaggccgtgggccgttcctccttctactgcctggagtactttccttctcaaatgcggagaacgggcaacaactttgagttcagctaccagtttgaggacgtgccttttcacagcagctacgcgcatagccaaagcctggaccggctgatgaaccccctcatcgaccagtacctgtactacctgtctcggactcagtccacgggaggtaccgcaggaactcagcagttgctattttctcaggccgggcctaataacatgtcggctcaggccaaaaactggctacccgggccctgctaccggcagcaacgcgtctccacgacactgtcgcaaaataacaacagcaactttgcttggaccggtgccaccaagtatcatctgaatggcagagactctctggtaaatcccggtgtcgctatggcaacgcacaaggacgacgaagagcgattttttccatccagcggagtcttgatgtttgggaaacagggagctggaaaagacaacgtggactatagcagcgttatgctaaccagtgaggaagaaatcaaaaccaccaacccagtggccacagaacagtacggcgtggtggccgataacctgcaacagcaaaacgccgctcctattgtaggggccgtcaacagtcaaggagccttacctggcatggtctggcagaaccgggacgtgtacctgcagggtcctatctgggccaagattcctcacacggacggcaactttcatccttcgccgctgatgggaggctttggactgaaacacccgcctcctcagatcctgattaagaatacacctgttcccgcggatcctccaactaccttcagtcaagccaagctggcgtcgttcatcacgcagtacagcaccggacaggtcagcgtggaaattgaatgggagctgcagaaagagaacagcaagcgctggaacccagagattcagtatacttccaactataacaaatctgttaatgtggactttactgtggacactaatggtgtgtattcagagcctcgccccattggcaccagatacctgactcgtaatctgtaa

SEQ ID NO: 200 - DNA, 3167 bp, Adeno-associated virus
attgaatttagcggccgcgaattcgcccttcgcagagaccaaagttcaactgaaacgaattaaacggtttattgattaacaagcaattacagattacgagtcaggtacctggtgccaatggggcgaggctctgaatacacaccattagtgtccacagtaaagtccacattaacagatttgttgtagttggaagtgtactgaatctcgggattccagcgtttgctgttctccttctgcagctcccactcgatctccacgctgacctgccccgtggagtactgtgtaatgaaggaagcaaactttgccgcactgaaggtagtcgaaggattcgcaggtaccggggtgttcttgatgagaatctgcgggggagggtgtttaagtccgaatccgcccatgaggggagaggggtgaaaatgtccgtccgtgtgtggaatctttgcccagatgggcccctgcaggtacacgtctctgtcctgccacaccatgcctggaagaacgccttgtgtgttgacatctgaggtagctgcttgtgtgttgccgctctggaggttggtagatacagaaccatactgctccgtagccacgggattggtggtcctgatttcctcttcgtctgtaatcatgaccttttcaatgtccacattagtttttcccgagtcttgttttccaaagatgagaaccccgctctgaggaaaaaacttttcttcatcgtccttgtggctggccatggccgggcccggattcaccagagagtctcttccattaaggtggtacttggtagctccagtccacgagtattcactgttgttgttatccgcagatgtctttgatactcgctgctggcggtaacagggtccaggaagccagttcctagactggtcccgaatgtcacttgctccggcctgagaaaactgaagccttgactgcgtggtggttccgcttggagtgtttgttctgctcaagtaatacaggtactggtcgatgagaggattcatgagacggtccaaactctggctgtgggcgtagctgctgtggaaaggaacgtcctcaaaggtgtagctgaaggtaaagttgtttccggtacgcagcatctgagaaggaaagtactccaggcagtaaaatgaagagcgtcctactgcctgactcccgttgttcagggtgaggtatccatactgtggcaccatgaagacgtctgctgggaacggcgggaggcatccttgatgcgccgagccgaggacgtacgggagctggtactccgagtcagtaaacacctgaaccgtgctggtaaggttattggcaatcgtcgtcgtaccgtcattctgcgtgacctccttgacttgaatgttaaagagcttgaagttgagtcttttgggccggaatccccaattgttgttgatgagtctttgccagtcacgtggcgaaaagtggcagtggaatctgttgaagtcaaaatacccccaaggggtgctgtagccaaagtagtggttgtcgtttgaggctcctgattggctggaaatctgcttgtagaggtggttgttgtaggtgggcagagcccaggtgcgggtgctggtggtgatgactctgtcgcccatccatgtggaatcgcaatgccaatttcccgaggaattacccactccgtcggcgccctcgttattgtctgccattggtgcgccactgcctgtagccatcgtattagttcccagaccagagggggctgctggtggctgtccgagaggctgggggtcaggtacggagtctgcgtctccagtctgaccgaaattcaatctctttcttgcaggctgctggcccgcttttccggttcccgaggaggagtctggctccgcaggagagtgctctaccggcctcttttttcccggagccgtcttaacaggttcctcaaccaggcccagaggttcaagaaccctctttttcgcctggaagactgctcgtccgaggttgcccccaaaagacgtatcttctttaagacgctcctggaactccgcgtcggcgtggttgtacttggggtacgggttgtctccgctgtcgagctgccggtcgtaggccttgtcgtgctcgagggccgcggcgtctgcctcgttgaccggctctcccttgtcgagtccgttgaagggtccaaggtacttgtacccaggaagcacaagacccctgctgtcgtccttatgccgctctgcgggctttggtggtggtgggccaggtttgagcttccaccactgtcttattccttcagagagagtgtcctcgagccaatctggaagataaccatcggcagccatacctgatttaaatcatttattgttcagagatgcagtcatccaaatccacattgaccagatcgcaagcagtgcaagcgtctggcacctttcccatgatatgatgaatgtagcacagtttctgatacgcctttttgacgacagaaacgggttgagattctgacacgggaaagcactctaaacagtctttctgtccgtgagtgaagcagatatttgaattctgattcattctctcgcattgtctgcagggaaacagcatcagattcatgcccacgtgacgagaacatttgttttggtacctgtccgcgtagttgattgaagcttccgcgtctgacgtcgatggctgcgcaactgactcgcgcgcccgtttgggctcacttatatctgcgtcactgggggcgggtctttttttggctccaccctttttgacgtagaattcatgctctacctcaaccacgtgatcctttgcccaccggaaaaagtctttgacttcctgcttggtgaccttcccaaagtcatgatccagacggcgggtgagttcaaatttgaacatccggtcttgcaacggctgctggtgttcgaaggtcgttgagttcccgtcaatcactgcgcacatgttggtgttggaggtgacaatcacgggagtcgggtctatctgggccgaggacttgcatttctggtccacgcgcaccttgcttcctccgagaatggctttggccgactccacgaccttggcggtcatcttcccctcctcccaccagatcaccatcttgtcgacgcaatcattgaaaggaaagttctcattggtccagttgacgcagccgtagaaagggcgaattcgtttaaacctgcaggactagtccctttagtgagggt

SEQ ID NO: 201 - DNA, 3161 bp, Adeno-associated virus
aattgaatttagcggccgcgaattcgcccttcgcagagaccaaagttcaactgaaacgaattaaacggtttattgattaacaagcaattacagattacgagtcaggtatctggtgccaatggggcgaggctctgaatacacaccattagtgtccacagtaaagtccacattaacagatttgttgtagttggaagtgtactgaatctcgggattccagcgtttgctgttctccttctgcagctcccactcgatctccacgctgacctgccccgtggagtactgtgtaatgaaggaagcaaactttgccgcactgaaggtagtcgaaggattcgcaggtaccggggtgttcttgatgagaatctgcgggggagggtgtttaagtccgaatccgcccatgaggggagaggggtgaaaatgtccgtccgtgtgtggaatctttgcccagatgggcccctgcaggtacacgtctctgtcctgccacaccatgcctggaagaacgccttgtgtgttgacatctgaggtagctgcttgtgtgttgccgctctggaggttggtagatacagaaccatactgctccgtagccacgggattggtggtcctgatttcctcttcgtctgtaatcatgaccttttcaatgtccacattagtttttcccgagtcttgttttccaaagatgagaaccccgctctgaggaaaaaacttttcttcatcgtccttgtggctggccatggccgggcccggattcaccagagagtctcttccattaaggtggtacttggtagctccagtccacgagtattcactgttgttgttatccgcagatgtctttgatactcgctgctggcggtaacagggtccaggaagccagttcctagactggtcccgaatgtcacttgctccggcctgagaaaactgaagccttgactgcgtggtggttccgcttggagtgtttgttctgctcaagtaatacaggtactggtcgacgagaggattcatgagacggtccaaactctggctgtgggcgtagctgctgtggaaaggaacgtcctcaaaggtgtagctgaaggtaaagttgtttccggtacgcagcatctgagaaggaaagtactccaggcagtaaaatgaagagcgtcctactgcctgactcccgttgttcagggtgaggtatccatactgtggcaccatgaagacgtctgctgggaacggcgggaggcatccttgatgcgccgagccgaggacgtacgggagctggtactccgagtcagtaaacacctgaaccgtgctggtaaggttattggcaatcgtcgtcgtaccgtcattctgcgtgacctccttgacttgaatgttaaagagcttgaagttgagtcttttgggccgggatccccaattgttgttgatgagtctttgccagtcacgtggcgaaaagtggcagtggaatctgttgaagtcaaaatacccccaaggggtgctgtagccaaagtagtggttgtcgtttgaggctcctgattggctggaaatctgcctgtagaggtggttgttgtaggtgggcagagcccaggtgcgggtgctggtggtgatgactctgtcgcccatccatgtggaatcgcaatgccaatttcccgaggaattacccactccgtcggcgccctcgttattgtctgccattggtgcgccactgcctgtagccatcgtattagttcccagaccagagggggctgctggtggctgtccgagaggctgggggtcaggtacggagtctgcgtctccagtctgaccgaaattcaatctccttcttgcaggctgctggcccgcttttccggttcccgaggaggagtctggctccgcaagagagtgctctaccggcctcttttttcccggagccgtcttaacaggttcctcaaccaggcccagaggttcaagaaccctctttttcgcctggaagactgctcgtccgaggttgcccccaaaagacgtatcttctttaagacgctcctggaactccgcgtcggcgtggttgtacttgaggtacgggttgtctccgccgtcgagctgccggtcgtaggccttgtcgtgctcgagggccgcggcgtctgcctcgttgaccggctctcccttgtcgagtccgttgaagggtccaaggtacttgtacccaggaagcacaagacccctgctgtcgtccttatgccgctctgcgggctttggtggtggtgggccaggtttgagcttccaccactgtcttattccttcagagagagtgtcctcgagccaatctggaagataaccatcggcagccatacctgatttaaatcatttattgttcagagatgcagtcatccaaatccacattgaccagatcgcaagcagtgcaagcgtctggcacctttcccatgatatgatgaatgtagcacagtttctgatacgcctttttgacgacagaaacgggttgagattctgacacgggaaagcactctaaacagtctttctgtccgtgagtgaagcagatatttgaattctgattcattctctcgcattgtctgcagggaaacagcatcagattcatgcccacgtgacgagaacatttgttttggtacctgtccgcgtagttgattgaagcttccgcgtctgacgtcgatggctgcgcaactgactcgcgcgcccgtttgggctcacttatatctgcgtcactgggggcgggtctttttttggctccaccctttttgacgtagaattcatgctctacctcaaccacgtgatcctttgcccaccggaaaaagtctttgacttcctgcttggtgaccttcccaaagtcatgatccagacggcgggtgagttcaaatttgaacatccggtcttgcaacggctgctggtgttcgaaggtcgttgagttcccgtcaatcactgcgcacatgttggtgttggaggtgacaatcacgggagtcgggtctatctgggccgaggacttgcatttctggtccacgcgcaccttgcttcctccgagaatggctttggccgactccacgaccttggcggtcatcttcccctcctcccaccagatcaccatcttgtcgacgcaatcattgaaaggaaagttctcattggtccagttgacgcagcaagggcgaattcgtttaaacctgcaggactagtccctttagtgaggg

SEQ ID NO: 202 - DNA, 3172 bp, Adeno-associated virus
gattgaatttagcggccgcgaattcgcccttgctgcgtcaactggaccaatgagaactttcccttcaacgattgcgtcgacaagatggtgatctggtgggaggagggcaagatgaccgccaaggtcgtggagtccgccaaggccattctgggtggaagcaaggtgcgcgtggaccaaaagtgcaagtcatcggcccagatcgaccccacgcccgtgatcgtcacctccaacaccaacatgtgcgccgtgatcgacgggaacagcaccaccttcgagcaccagcagcccctgcaggaccgcatgttcaagttcgagctcacccgccgtctggagcacgactttggcaaggtgaccaagcaggaagtcaaagagttcttccgctgggctcaggatcacgtgactgaggtggcgcatgagttctacgtcagaaagggcggagccaccaaaagacccgcccccagtgacgcggatataagcgagcccaagcgggcctgcccctcagttgcggagccatcgacgtcagacgcggaagcaccggtggactttgcggacaggtaccaaaacaaatgttctcgtcacgcgggcatgcttcagatgctgtttccctgcaagacatgcgagagaatgaatcagaatttcaacgtctgcttcacgcacggggtcagagactgctcagagtgcttccccggcgcgtcggaatctcaacccgtcgtcagaaaaaagacgtatcagaaactgtgcgcgattcatcatctgctggggcgggcacccgagattgcgtgttcggcctgcgatctcgtcaacgtggacttggatgactgtgtttctgagcaataaatgacttaaaccaggtatggctgctgacggttatcttccagattggctcgaggacaacctctctgagggcattcgcgagtggtgggacctgaaacctggagcccccaagcccaaggccaaccagcagaagcaggacgacggccggggtctggtgcttcctggctacaagtacctcggacccttcaacggactcgacaagggggagcccgtcaacgcggcggacgcagcggccctcgagcacgacaaggcctacgaccagcagctcaaagcgggtgacaatccgtacctgcggtataaccacgccgacgccgagtttcaggagcgtctgcaagaagatacgtcttttgggggcaacctcgggcgagcagtcttccaggccaagaagcgggttctcgaacctctcggtctggttgaggaagctgctaagacggctcctggaaagaagagaccggtagaaccgtcacctcagcgttcccccgactcctccgcgggcatcggcaagaaaggccagcagcccgctaaaaagagactgaactttggtcagactggcgactcagagtcagtccccgaccctcaaccaatcggagaaccaccagcaggcccctctggtctgggatctggtacaatggctgcaggcggtggcgctccaatggcagacaataacgaaggcgccgacggagtgggtagttcctcaggaaattggcattgcgattccacatggctgggcgacagagtcatcaccaccagcacccgaacctgggccctgcccacctacaacaaccacctctacaagcaaatatccaatgggacatcgggaggaagcaccaacgacaacacctacttcggctacagcaccccctgggggtattttgacttcaacagattccactgccacttctcaccacgtgactggcagcgactcatcaacaacaactggggattccggccaaaaagactcagcttcaagctcttcaacatccaggtcaaggaggtcacgcagaatgaaggcaccgagaccatcgccaataaccttaccagcacgattcaggtatttacggactcggaataccagctgccgtacgtcctcggctccgcgcaccagggctgcctgcctccgttcccggcggacgtcttcatgattccccagtacggctaccttacactgaacaatggaagtcaagccgtaggccgttcctccttctactgcctggaatattttccatctcaaatgctgcgaactggaaacaattttgaattcagctacaccttcgaggacgtgcctttccacagcagctgcgcacacagccagagctcggaccgactgatgaatcctctcatcgaccagtacctgtactacttatccagaactcggtccacaggaggaactcaaggtacccagcaattgttattttctcaagctgggcctgcaaacatgtcggctcaggctaagaactggctacctggaccttgctaccggcagcagcgagtctctacgacactgtcgcaaaacaacaacagcaactttgcttggactggtgccaccaaatatcacctgaacggaagagactctttggtaaatcccggtgtcgccatggcaacccacaaggacgacgaggaacgcttcttcccgtcgagtggagtcctgatgtttggaaaacagggtgctggaagagacaatgtggactacagcagcgttatgctaaccagcgaagaagaaattaaaaccactaaccctgtagccacagaacaatacggtgtggtggctgacaacttgcagcaaaccaatacagggcctattgtgggaaatgtcaacagccaaggagccttacctggcatggtctggcagaaccgagacgtgtacctgcagggtcccatctgggccaagattcctcacacggacggcaacttccacccttcaccgctaatgggaggatttggactgaagcacccacctcctcagatcctgatcaagaacacgccggtacctgcggatcctccaacaacgttcagccaggcgaaattggcttccttcattacgcagtacagcaccggacaggtcagcgtggaaatcgagtgggagctgcagaaggagaacagcaaacgctggaacccagagattcagtacacttcaaactactacaaatctacaaatgtggactttgctgtcaatacagagggaacttattctgagcctcgccccattggtactcgttacctcacccgtaatctgtaattgctggttaatcaataaaccgtttgattcgtttcagttgaactttggtctctgcgaagggcgaattcgtttaaacctgcaggactagtccctttagtgagg

SEQ ID NO: 203 - DNA, 3172 bp, Adeno-associated virus
gattgaatttagcggccgcgaattcgcccttgctgcgtcaactggaccaatgagaactttcccttcaacgattgcgtcgacaagatggtgatctggtgggaggagggcaagatgaccgccaaggtcgtggagtccgccaaggccattctgggtggaagcaaggtgcgcgtggaccaaaagtgcaagtcatcggcccagatcgaccccacgcccgtgatcgtcacctccaacaccaacatgtgcgccgtgatcggcgggaacagcaccaccttcgagcaccagcagcccctgcaggaccgcatgttcaagttcgagctcacccgccgtctggagcacgactttggcaaggtgaccaagcaggaagtcaaagagttcttccgctgggctcaggatcacgtgactgaggtggcgcatgagttctacgtcagaaagggcggagccaccaaaagacccgcccccagtgacgcggatataagcgagcccaagcgggcctgcccctcagttgcggagccatcgacgtcagacgcggaagcaccggtggactttgcggacaggtaccaaaacaaatgttctcgtcacgcgggcatgcttcagatgctgtttccctgcaagacatgcgagagaatgaatcagaatttcaacgtctgcttcacgcacggggtcagagactgctcagagtgcctccccggcgcgtcagaatctcaacccgtcgtcagaaaaaagacgtatcagaaactgtgcgcgattcatcatctgctggggcgggcacccgagattgcgtgttcggcctgcgatctcgtcaacgtggacttggatgactgtgtttctgagcaataaatgacttaaaccaggtatggctgctgacggttatcttccagattggctcgaggacaacctctctgagggcattcgcgagtggtgggacctgaaacctggagcccccaagcccaaggccaaccagcagaagcaggacgacggccggggtctggtgcttcttggctacaagtacctcggacccttcaacggactcgacaagggggagcccgtcaatgcggcggacgcagcggccctcgagcacgacaaggcctacgaccagcagctcaaagcgggtgacaatccgtacctgcggtataaccacgccgacgccgagtttcaggagcgtctgcaagaagatacgtcttttgggggcaacctcgggcgagcagtcttccaggccaagaagcgggttctcgaacctctcggtctggttgaggaagctgctaagacggctcctggaaagaagagaccggtagaaccgtcacctcagcgttcccccgactcctccacgggcatcggcaagaaaggccagcagcccgctaaaaagagactgaactttggtcagactggcgactcagagtcagtccccgaccctcaaccaatcggagaaccaccagcaggcccctctggtctgggatctggtacaatggctgcaggcggtggcgctccaatggcagacaataacgaaggcgccgacggagtgggtagttcctcaggaaattggcattgcgattccacatggctgggcgacagagtcatcaccaccagcacccgaacctgggccctgcccacctacaacaaccacctctacaagcaaatatccaatgggacatcgggaggaagcaccaacgacaacacctacttcggctacagcaccccctgggggtattttgacttcaacagattccactgccacttctcaccacgtgactggcagcgactcatcaacaacaactggggattccggccaaaaagactcagcttcaagctcttcaacatccaggtcaaggaggtcacgcagaatgaaggcaccaagaccatcgccaataaccttaccagcacgattcaggtatttacggactcggaataccagctgccgtacgtcctcggctccgcgcaccagggctgcctgcctccgttcccggcggacgtcttcatgattccccagtacggctaccttacactgaacaatggaagtcaagccgtaggccgttcctccttctactgcctggaatattttccatctcaaatgctgcgaactggaaacaattttgaattcagctacaccttcgaggacgtgcctttccacagcggctacgcacacagccagagcttggaccgactgatgaatcctctcatcgaccagtacctgtactacttatccagaactcagtccacaggaggaactcaaggtacccagcaattgttattttctcaagctgggcctgcaaacatgtcggctcaggctaagaactggctacctggaccttgctaccggcagcagcgagtctctacgacactgtcgcaaaacaacaacagcaactttgcttggactggtgccaccaaatatcacctgaacggaagagactctttggtaaatcccggtgtcgccatggcaacccacaaggacgacgaggaacgcttcttcccgtcgagtggagtcctgatgtttggaaaacagggtgctggaagagacaatgtggactacagcagcgttatgctaaccagcgaagaagaaattaaaaccactaaccctgtagccacagaacaatacggtgtggtggctgacaacttgcagcaaaccaatacagggcctattgtgggaaatgtcaacagccaaggagccttacctggcatggtctggcagaaccgagacgtgtacctgcagggtcccatctgggccaagattcctcacacggacggcaacttccacccttcaccgctaatgggaggatttggactgaagcacccacctcctcagatcctgatcaagaacacgccggtacctgcggatcctccaacgacgttcagccaggcgaaattggcttccttcattacgcagtacagcaccggacaggtcagcgtggaaatcgagtgggagctgcagaaggagaacagcaaacgctggaacccagagattcagtacacttcaaactactacaaatctacaaatgtggactttgctgtcaatacagagggaacttattctgagcctcgccccattggtactcgttacctcacccgtaatctgtaattgctggttaatcaataaaccgtttgattcgtttcagttgaactttggtctctgcgaagggcgaattcgtttaaacctgcaggactagtccctttagtgagg

SEQ ID NO: 204 - DNA, 2208 bp, Adeno-associated virus
atggctgccgatggttatcttccagattggctcgaggacactctctctgaaggaataagacagtggtggaagctcaaacctggcccaccaccaccaaagcccgcagagcggcataaggacgacagcaggggtcttgtgcttcctgggtacaagtacctcggacccttcaacggactcgacaagggagagccggtcaacgaggcagacgccgcggccctcgagcacgacaaggcctacgaccggcagctcgaaagcggagacaacccgtacctcaagtacaaccacgccgacgcggagtttcaggagcgtcttaaagaagatacgtcttttgggggcaacctcggacgagcagtcttccaggcgaaaaagagggttcttgaacctctgggcctggttgaggagcctgttaaaacggctccgggaaaaaagaggccggtagagcactctcctgtggagccagactcctcctcgggaaccggaaaagcgggccagcagcctgcgagaaaaagattgaattttggtcagactggagacgcagactccgtacctgacccccagcctctcggacagccaccagcagccccctctggtctgggatctactacaatggcttcaggcagtggcgcaccagtggcagacaataacgagggtgccgatggagtgggtaattcctcaggaaattggcattgcgattcccaatggctgggcgacagagtcatcaccaccagcacccgaacctgggccctgcccacctacaacaaccacctctacaagcaaatctccagccaatcaggagcctcaaacgacaaccactactttggctacagcaccccctgggggtattttgacttcaacagattccactgccacttttcaccacgtgactggcaaagactcatcaacaacagctggggattccgacccaaaagactcaacttcaagctctttaacattcaagtcaaagaggtcacgcagaatgacggtacgacgacgattgccaataaccttaccagcacggttcaagtgtttaccgactcggagtaccagctcccgtacgtcctcggctcggcgcatcaaggatgcctcccgccgttcccagcagacgtctttatggtcccacagtatggatacctcaccctgaacaacgggagtcaggcggtaggacgctcttccttttactgcctggagtactttccttctcagatgctgcgtactggaaacaactttcagttcagctacacctttgaagacgttcccttccacagcagctacgctcacagccagagtctggatcggctgctgaatcctctgatcgaccagtacctatattatctgaacaagacacaatcaaatagtggaactcttcagcagtctcggctactgtttagccaagctggacccaccagcatgtctcttcaagctaaaaactggctgcctggaccttgctacagacagcagcgtctgtcaaagcaggcaaacgacaacaacaacagcaactttccctggactgcggctacaaagtatcatctaaatggccgggactcgttggttaatccaggaccagctatggccagccacaaagacgatgaagaaaagtttttccccatgcatggaaccctgatatttggtaaacaaggaacaaatgctaacgacgcggatttggacaatgtcatgattacagatgaagaagaaatccgcaccaccaatcccgtggctacggagcagtacggatatgtgtcaaataatttgcaaaactcaaatactggtccaactactggaactgtcaatcaccaaggagcgttacctggtatggtgtggcaggatcgagacgtgtacctgcagggacccatttgggccaagattcctcacacggacgggcactttcatccttctccactaatgggaggttttgggctcaaacacccgcctcctcagatcatgatcaaaaacactcccgttccagccaatcctcctacaaacttcagttcttccaagtttgcttctttcatcacacagtattccacggggcaggtcagcgtggagatcgagtgggagctgcagaaggagaacagcaaacgctggaatcccgaaattcagtatacttccaactacaacaaatctgttaatgtggactttactgtggacactaatggtgtgtattcagagcctcgccccattggcaccagatacccgactcgtaatctgtaa

SEQ ID NO: 205 - protein, 735 aa, Adeno-associated virus
MAADGYLPDWLEDTLSEGIRQWWKLKPGPPPPKPAERHKDDSRGLVLPGYKYLGPFNGLDKGEPVNEADAAALEHDKAYDRQLESGDNPYLKYNHADAEFQERLKEDTSFGGNLGRAVFQAKKRVLEPLGLVEEPVKTAPGKKRPVEHSPVEPDSSSGTGKAGQQPARKRLNFGQTGDADSVPDPQPLGQPPAAPSGLGSTTMASGSGAPVADNNEGADGVGNSSGNWHCDSQWLGDRVITTSTRTWALPTYNNHLYKQISSQSGASNDNHYFGYSTPWGYFDFNRFHCHFSPRDWQRLINNSWGFRPKRLNFKLFNIQVKEVTQNDGTTTIANNLTSTVQVFTDSEYQLPYVLGSAHQGCLPPFPADVFMVPQYGYLTLNNGSQAVGRSSFYCLEYFPSQMLRTGNNFQFSYTFEDVPFHSSYAHSQSLDRLLNPLIDQYLYYLNKTQSNSGTLQQSRLLFSQAGPTSMSLQAKNWLPGPCYRQQRLSKQANDNNNSNFPWTAATKYHLNGRDSLVNPGPAMASHKDDEEKFFPMHGTLIFGKQGTNANDADLDNVMITDEEEIRTTNPVATEQYGYVSNNLQNSNTGPTTGTVNHQGALPGMVWQDRDVYLQGPIWAKIPHTDGHFHPSPLMGGFGLKHPPPQIMIKNTPVPANPPTNFSSSKFASFITQYSTGQVSVEIEWELQKENSKRWNPEIQYTSNYNKSVNVDFTVDTNGVYSEPRPIGTRYPTRNL

SEQ ID NO: 206 - DNA, 2208 bp, Adeno-associated virus
atggctgccgatggttatcttccagattggctcgaggacactctctctgaaggaataagacagtggtggaagctcaaacctggcccaccaccaccaaagcccgcagagcggcataaggacgacagcaggggtcttgtgcttcctgggtacaagtacctcggacccttcaacggactcgacaagggagagccggtcaacgaggcagacgccgcggccctcgagcacgacaaggcctacgaccggcagctcgacagcggagacaacccgtacctcaagtacaaccacgccgacgcggagtttcaggagcgtcttaaagaagatacgtcttttgggggcaacctcggacgagcagtcttccaggccaaaaagaggattcttgaacctctgggcctggttgaggaacctgttaagacggctccgggagaaaagaggccggtagagcactctcctgcggagccagactcctcctcgggaaccggaaaagcgggccagcagcctgcaagaaagagattgaattttggccagactggagacgcagactcagtacctgacccccagcctctcggacagccaccagcagccccctctggtctgggaactaatacgatggcttcaggcagtggcgcaccaatggcagacaataacgagggcgccgacggagtgggtaattcctcgggaaattggtattgcgattccacatggatgggcgacagagtcatcaccaccagcacccgcacctgggccctgcccacctacaacaaccatctgtacaagcaaatctccagccagtctggagccagcaacgacaaccactactttggctacagcaccccctgggggtattttgacttcaacagattccactgccacttctccccacgtgactggcaaagactcatcaacaacaactggggattccggcccaagagactcagcttcaagctctttaacattcaagtcaaagaggtcacgcagaatgacggtacgacgacgattgccaataaccttaccagcacggttcaggtgtttactgactcggagtaccagctcccgtacgtcctcggctcggcgcatcaaggatgcctcccgccgttcccagcagacgtcttcatggtgccacagtatggatacctcaccctgaacaacggcagtcaggcggtaggacgctcttccttttactgcctggagtactttccttctcagatgcttcgtaccggaaacaactttaccttcagctacacctttgaagacgttcctttccatagcagctacgctcacagccaaagtctggaccgtctcatgaatcctctcatcgaccagtacctgtattacttgagcagaacaaacactccaagcggaaccaccacgatgtccaggcttcagttttctcaggccggagcaagtgacattcgggaccagtctagaaactggcttcctggaccctgttaccgccagcagcgagtatcaaagacagctgcggacaacaacaacagtgattactcgtggactggagctaccaagtaccacctcaatggaagagactctctggtgaatccgggcccagctatggccagccacaaggacgatgaagaaaaatattttcctcagagcggggttctcatctttggaaaacaagactcgggaaaaactaatgtggacattgaaaaggttatgattacagacgaagaggaaatcaggaccaccaatcccgtggctacggagcagtatggttctgtatctaccaacctccagagcggcaacacacaagcagctacctcagatgtcaacacacaaggcgttcttccaggcatggtctggcaggacagagacgtgtacctgcaggggcccatctgggcaaagattccacacacggacggacattttcacccctctcccctcgtgggcggattcggacttaaacaccctcctccacaaattctcatcaagaacaccccggtacctgcgaatccttcgaccactttcagtgcggcaaagtttgcttccttcatcacacagtactccacggggcaggtcagcgtggagatcgagtgggagctgcagaaggagaacagcaaacgctggaatcccgaaattcagtacacttccaactacaacaaatctgttaatgtggactttactgtggacactaatggtgtgtattcagagcctcgccccattggcaccagatacctgactcgtaatctgtaa

SEQ ID NO: 207 - protein, 735 aa, Adeno-associated virus
MAADGYLPDWLEDTLSEGIRQWWKLKPGPPPPKPAERHKDDSRGLVLPGYKYLGPFNGLDKGEPVNEADAAALEHDKAYDRQLDSGDNPYLKYNHADAEFQERLKEDTSFGGNLGRAVFQAKKRILEPLGLVEEPVKTAPGEKRPVEHSPAEPDSSSGTGKAGQQPARKRLNFGQTGDADSVPDPQPLGQPPAAPSGLGTNTMASGSGAPMADNNEGADGVGNSSGNWYCDSTWMGDRVITTSTRTWALPTYNNHLYKQISSQSGASNDNHYFGYSTPWGYFDFNRFHCHFSPRDWQRLINNNWGFRPKRLSFKLFNIQVKEVTQNDGTTTIANNLTSTVQVFTDSEYQLPYVLGSAHQGCLPPFPADVFMVPQYGYLTLNNGSQAVGRSSFYCLEYFPSQMLRTGNNFTFSYTFEDVPFHSSYAHSQSLDRLMNPLIDQYLYYLSRTNTPSGTTTMSRLQFSQAGASDIRDQSRNWLPGPCYRQQRVSKTAADNNNSDYSWTGATKYHLNGRDSLVNPGPAMASHKDDEEKYFPQSGVLIFGKQDSGKTNVDIEKVMITDEEEIRTTNPVATEQYGSVSTNLQSGNTQAATSDVNTQGVLPGMVWQDRDVYLQGPIWAKIPHTDGHFHPSPLVGGFGLKHPPPQILIKNTPVPANPSTTFSAAKFASFITQYSTGQVSVEIEWELQKENSKRWNPEIQYTSNYNKSVNVDFTVDTNGVYSEPRPIGTRYLTRNL

SEQ ID NO: 208 - DNA, 2209 bp, Adeno-associated virus
atggctgccgatggttatcctccagattggctcgaggacactctctctgaagggataagacagtggtggaagctcaaacctggcccaccaccaccaaagcccgcagagcggcataaggacgacagcaggggtcttgtgcttcctgggtacaagtacctcggacccttcaacggactcgacaagggggagccggtcaacgaggcagacgccgcggccctcgagcacgacaaggcctacgaccggcagctcgacagcggagacaacccgtacctcaagtacaaccacgccgacgcagagtttcaggagcgccttaaagaagatacgtcttttgggggcaacctcggacgagcagtcttccaggcgaaaaagagggttcttgaacctctgggcctggttgaggaacctgttaagacggctccgggaaaaaagaggccggtagagcactctcctgtggagccagactcctcctcgggaaccggaaaagcgggccagcggcctgcaagaaaaagattaaattttggtcagactggagacgcagactccgtacctgacccccagcctctcggacagccaccagcagccccctctggtctgggatctactacaatggctacaggcagtggcgcaccaatggcagacaataacgagggtgccgatggagtgggtaattcctcaggaaattggcattgcgattcccaatggctgggcgacagagtcatcaccaccagcacccgaacctgggccctgcccacatacaacaaccacctctacaagcaaatctccagccaatcaggagccagcaacgacaaccactactttggctacagcaccccctgggggtattttgacttcaacagattccactgccacttttcaccacgtgactggcaaagactcatcaacaacaactggggattccggcccaaaagactcaacttcaagctctttaatattcaagtcaaagaggtcacgcagaatgacggtacgacgacgattgccaataaccttaccagcacggttcaggtgtttactgactcggagtaccagctcccgtacgtcctgggctcggcgcatcaaggatgcctcccgccgtttccagcggacgtcttcatggtcccacagtatggatacctcaccctgaacaacgggagtcaggcggtaggacgctcttccttttactgcctggagtactttccttctcagatgctgcgtactggaaacaactttcagttcagctacacttttgaagacgtgcctttccacagcagctacgctcacagccagagtctggatcggctgatgaatcctctgatcgaccagtacctgtattatctgaacaagacacaaacaaatagtggaactcttcagcagtctcggctactgtttagccaagctggaccaaccaacatgtctcttcaagctaaaaactggctgcctggaccttgctacagacagcagcgtctgtcaaaacaggcaaacgacaacaacaacagcaactttccctggactgcagctacaaagtatcatctaaatggccgggactcgttggttaatccaggaccagctatggccagtcacaaggatgacgaagaaaagtttttccccatgcatggaaccctgatatttggtaaacaaggaacaaatgccaacgacgcggatttggaaaatgtcatgattacagatgaagaagaaatcagggccaccaatcccgtggctacggagcagtacgggactgtgtcaaataatttgcaaaactcaaacactggtccaactactggaactgtcaatcgccaaggagcgttacctggtatggtgtggcaggatcgagacgtgtacctgcagggacccatttgggccaagattcctcacaccgatggacactttcatccttctccactgatgggaggttttggactcaaacacccgcctcctcagatcatgatcaaaaacactcccgttccagccaatcctcccacaaacttcagttctgccaagtttgcttctttcatcacacagtattccacgggacaggtcagcgtggagatcgagtgggagctgcagaaggagaacagcaaacgctggaatcccgaaattcagtacacttccaactacaacaagtctgttaatgtggactttactgtggacactaatggtgtgtattcagagcctcgccccattggcaccagatacctgactcgtaatctgtaat

SEQ ID NO: 209 - protein, 735 aa, Adeno-associated virus
MAADGYPPDWLEDTLSEGIRQWWKLKPGPPPPKPAERHKDDSRGLVLPGYKYLGPFNGLDKGEPVNEADAAALEHDKAYDRQLDSGDNPYLKYNHADAEFQERLKEDTSFGGNLGRAVFQAKKRVLEPLGLVEEPVKTAPGKKRPVEHSPVEPDSSSGTGKAGQRPARKRLNFGQTGDADSVPDPQPLGQPPAAPSGLGSTTMATGSGAPMADNNEGADGVGNSSGNWHCDSQWLGDRVITTSTRTWALPTYNNHLYKQISSQSGASNDNHYFGYSTPWGYFDFNRFHCHFSPRDWQRLINNNWGFRPKRLNFKLFNIQVKEVTQNDGTTTIANNLTSTVQVFTDSEYQLPYVLGSAHQGCLPPFPADVFMVPQYGYLTLNNGSQAVGRSSFYCLEYFPSQMLRTGNNFQFSYTFEDVPFHSSYAHSQSLDRLMNPLIDQYLYYLNKTQTNSGTLQQSRLLFSQAGPTNMSLQAKNWLPGPCYRQQRLSKQANDNNNSNFPWTAATKYHLNGRDSLVNPGPAMASHKDDEEKFFPMHGTLIFGKQGTNANDADLENVMITDEEEIRATNPVATEQYGTVSNNLQNSNTGPTTGTVNRQGALPGMVWQDRDVYLQGPIWAKIPHTDGHFHPSPLMGGFGLKHPPPQIMIKNTPVPANPPTNFSSAKFASFITQYSTGQVSVEIEWELQKENSKRWNPEIQYTSNYNKSVNVDFTVDTNGVYSEPRPIGTRYLTRNL

SEQ ID NO: 210 - DNA, 2208 bp, Adeno-associated virus
atggctgccgatggttatcttccagattggctcgaggacactctctctgaaggaataagacagtggtggaagctcaaacctggcccaccaccaccaaagcccgcagagcggcataaggacgacagcaggggtcttgtgcttcctgggtacaggtacctcggacccttcaacggactcgacaagggagagccggtcaacgaggcagacgccgcggccctcgagcacgacaaggcctacgaccggcagctcgacagcggagacaacccgtacctcaagtacaaccacgtcgacgcggagtttcaggagcgtcttaaagaagatacgtcttttgggggcaacctcggacgagcagtcttccaggccaaaaagaggattcttgaacctctgggcctggttgaggaacctgttaaggcggctccgggagaaaagaggccggtagagcactctcctgcggagccagactcctcctcgggaaccggaaaagcgggccagcagcctgcaagaaagagattgaattttggtcagactggagacgcagactcagtacctgacccccagcctctcggacagccaccagcagccccctctggtctgggaactaatacgatggcttcaggcagtggcgcaccaatggcagacaataacgagggcgccgacggagtgggtaattcctcgggaaattggcattgcgattccacatggatgggcgacagagtcatcaccaccagcacccgcacctgggccctgcccacctacaacaaccatctgtacaagcaaatctccagccagtctggagccagcaacgacaaccactactttggctacagcaccccctgggggcattttgacttcaacagattccactgccacttctccccacgtgactggcaaagactcatcaacaacaactggggattccggcccaagagactcagcttcaagctctttaacattcaagtcaaagaggtcacgcagaatgacggtacgacgacgattgccaataaccttaccagcacggttcaggtgtttactgactcggagtaccagctcccgtacgtcctcggctcggcgcatcaaggatgcctcccgccgttcccagcagacgtcttcatggtgccacagtatggatacctcaccctgaacaacggcagtcaggcggtaggacgctcttccttttactgcctggagtactttccttctcagatgcttcgtaccggaaacaactttaccttcagctacacctttgaagacgttcctttccatagcagctacgctcacagccaaagtctggaccgtctcatgaatcctctcatcgaccagtacctgtattacttgagcagaacaaacactccaagcggaaccaccacgatgtccaggcttcagttttctcaggccggagcaagtgacattcgggaccagtctagaaactggcttcctggaccctgttaccgccagcagcgagtatcaaagacagctgcggacaacaacaacagtgattactcgtggactggagctaccaagtaccacctcaatggaagagactctctggtgaatccgggcccagctatggccagccacaaggacgatgaagaaaaatattttcctcagagcggggttctcatctttggaaaacaagactcgggaaaaactaatgtggacattgaaaaggttatgattacagacgaagaggaaatcaggaccaccaatcccgtggctacggagcagtatggttctgtatctaccaacctccagagcggcaacacacaagcagctacctcagatgtcaacacacaaggcgttcttccaggcatggtctggcaggacagagacgtgtacctgcaggggcccatctgggcaaagattccacacacggacggacattttcacccctctccccccatgggcggattcggacttaaacaccctcctccacaaattctcatcaagaacaccccggtacctgcgaatccttcgaccactttcagtgcggcaaagtttgcttccttcatcacacagtactccacggggcaggtcagcgtggagatcgagtgggagctgcagaaggagaacagcaaacgctggaatcccgaaattcagtacacttccaactacaacaaatctgttaatgtggactttactgtggacactaatggtgtgtattcagagcctcgccccattggcgccagatacctgactcgtaatctgtaa

SEQ ID NO: 211 - protein, 735 aa, Adeno-associated virus
MAADGYLPDWLEDTLSEGIRQWWKLKPGPPPPKPAERHKDDSRGLVLPGYRYLGPFNGLDKGEPVNEADAAALEHDKAYDRQLDSGDNPYLKYNHVDAEFQERLKEDTSFGGNLGRAVFQAKKRILEPLGLVEEPVKAAPGEKRPVEHSPAEPDSSSGTGKAGQQPARKRLNFGQTGDADSVPDPQPLGQPPAAPSGLGTNTMASGSGAPMADNNEGADGVGNSSGNWHCDSTWMGDRVITTSTRTWALPTYNNHLYKQISSQSGASNDNHYFGYSTPWGHFDFNRFHCHFSPRDWQRLINNNWGFRPKRLSFKLFNIQVKEVTQNDGTTTIANNLTSTVQVFTDSEYQLPYVLGSAHQGCLPPFPADVFMVPQYGYLTLNNGSQAVGRSSFYCLEYFPSQMLRTGNNFTFSYTFEDVPFHSSYAHSQSLDRLMNPLIDQYLYYLSRTNTPSGTTTMSRLQFSQAGASDIRDQSRNWLPGPCYRQQRVSKTAADNNNSDYSWTGATKYHLNGRDSLVNPGPAMASHKDDEEKYFPQSGVLIFGKQDSGKTNVDIEKVMITDEEEIRTTNPVATEQYGSVSTNLQSGNTQAATSDVNTQGVLPGMVWQDRDVYLQGPIWAKIPHTDGHFHPSPPMGGFGLKHPPPQILIKNTPVPANPSTTFSAAKFASFITQYSTGQVSVEIEWELQKENSKRWNPEIQYTSNYNKSVNVDFTVDTNGVYSEPRPIGARYLTRNL

SEQ ID NO: 212 - DNA, 2208 bp, Adeno-associated virus
atggctgccgatggttatcttccagattggctcgaggacaccctctctgaaggaataagacagtggtggaagctcaaacctggcccaccaccaccaaagcccgcagagcggcataaggacgacagcaggggtcttgtgcttcctgggtacaagtacctcggacccttcaacggactcgacaagggagagccggtcaacgaggcagacgccgcggccctcgagcacgacaaggcctacgaccggcagctcgacagcggagataacccgtacctcaagtacaaccacgccgacgcggagtttcaggagcgccttaaagaggatacgtcttttgggggcaacctcggacgagcagtcttccaggccaaaaagaggattcttgaacctctgggcctggttgaggaacctgttaagacggctccgggaaaaaagaggccggtagagcactctcctgcggagccagactcctcctcgggaaccggaaaagcgggccagcagcctgcaagaaagagattgaattttggtcagactggagacgcagactcagtacctgacccccggcctctcggacagccaccagcagccccctctggtctgggaactaatacgatggcttcaggcagtggcgcaccaatggcagacaataacgagggcgccgacggagtgggtaattcctcgggaaattggcattgcgattccacatggatgggcgacagagtcatcaccaccagcacccgcacctgggccctgcccacctacaacaaccatctgtacaagcaaatctccagccagtctggagccagcaacgacaaccactactttggctacagcaccccctgggggtattttgacttcaacagattccactgccacttctccccacgtgactggcaaagactcatcaacaacaactggggattccggcccaagagactcagcttcaagctctttaacattcaagtcaaagaggtcacgcagaatgacggtacgacgacgattgccaataaccttaccagcacggttcaggtgtttactgactcggagtaccagctcccgtacgtcctcggctcggcgcatcaaggatgcctcccgccgttcccagcagacgtcttcatggtgccacagtatggatacctcaccctgaacaacggcagtcaggcggtaggacgctcttccttttactgcctggagtactttccttctcagatgcttcgtaccggaaacaactttaccttcagctacacctttgaagacgttcctttccatagcagctacgctcacagccaaagtctggaccgtctcatgaatcctctcatcgaccagtacctgtattacttgagcagaacaaacactccaagcggaaccaccacgatgtccaggcttcagttttctcaggccggagcaagtgacattcgggaccagtctagaaactggcttcctggaccctgttaccgccagcagcgagtatcaaagacagctgcggacaacaacaacagtgattactcgtggactggagctaccaagtaccacctcaatggaagagactctctggtgaatccgggcccagctatggccagccacaaggacgatgaagaaaaatattttcctcagagcggggttctcatctttggaaaacaagactcgggaaaaactaatgtggacattgaaaaggttatgattacagacgaagaggaaatcaggaccaccaatcccgtggctacggagcagtatggttctgtatctaccaacctccagagcggcaacacacaagcagctacctcagatgtcaacacacaaggcgttcttccaggcatggtctggcaggacagagacgtgtacctgcaggggcccatctgggcaaagattccacacacggacggacattttcacccctctcccctcatgggcggattcggacttaaacaccctcctccacaaattctcatcaagaacaccccggtacctgcgaatccttcgaccactttcagtgcggcaaagtttgcttccttcatcacacagtactccacggggcaggtcagcgtggagatcgagtgggagctgcagaaggagaacagcaaacgctggaatcccgaaattcagtacacttccaactacaacaaatctgttaatgtggactttactgtggacactaatggtgtgtattcagagcctcgccccattggcaccagatacctgactcgtaatctgtaa

SEQ ID NO: 213 - protein, 735 aa, Adeno-associated virus
MAADGYLPDWLEDTLSEGIRQWWKLKPGPPPPKPAERHKDDSRGLVLPGYKYLGPFNGLDKGEPVNEADAAALEHDKAYDRQLDSGDNPYLKYNHADAEFQERLKEDTSFGGNLGRAVFQAKKRILEPLGLVEEPVKTAPGKKRPVEHSPAEPDSSSGTGKAGQQPARKRLNFGQTGDADSVPDPRPLGQPPAAPSGLGTNTMASGSGAPMADNNEGADGVGNSSGNWHCDSTWMGDRVITTSTRTWALPTYNNHLYKQISSQSGASNDNHYFGYSTPWGYFDFNRFHCHFSPRDWQRLINNNWGFRPKRLSFKLFNIQVKEVTQNDGTTTIANNLTSTVQVFTDSEYQLPYVLGSAHQGCLPPFPADVFMVPQYGYLTLNNGSQAVGRSSFYCLEYFPSQMLRTGNNFTFSYTFEDVPFHSSYAHSQSLDRLMNPLIDQYLYYLSRTNTPSGTTTMSRLQFSQAGASDIRDQSRNWLPGPCYRQQRVSKTAADNNNSDYSWTGATKYHLNGRDSLVNPGPAMASHKDDEEKYFPQSGVLIFGKQDSGKTNVDIEKVMITDEEEIRTTNPVATEQYGSVSTNLQSGNTQAATSDVNTQGVLPGMVWQDRDVYLQGPIWAKIPHTDGHFHPSPLMGGFGLKHPPPQILIKNTPVPANPSTTFSAAKFASFITQYSTGQVSVEIEWELQKENSKRWNPEIQYTSNYNKSVNVDFTVDTNGVYSEPRPIGTRYLTRNL

SEQ ID NO: 214 - DNA, 2208 bp, Adeno-associated virus
atggctgccgatggttatcttccagattggctcgaggacactctctctgaaggaataagacagtggtggaagctcaaacctggcccaccaccaccaaagcccgcagagcggcataaggacgacagcaggggtcttgtgcttcctgggtacaagtacctcggacccttcaacggactcgacaagggagagccggtcaacgaggcagacgccgcggccctcgagcacgacaaggcctacgaccggcagctcgacagcggagacaacccgtacctcaagtacaaccacgccgacgcggagtttcaggagcgccttaaaggagatacgtcttttgggggcaacctcggacgagcagtcttccaggccaaaaagaggattcttgaacctctgggcctggttgaggaacctgttaagacggctccgggaaaaaagaggccggtagagcactctcctgcggagccagactcctcctcgggaaccggaaaagcgggccagcagcctgcaagaaagagattgaattttggtcagactggagacgcagactcagtacctgacccccagcctctcggacagccaccagcagccccctctggtctgggaactaatacgatggcttcaggcagtggcgcaccaatggcagacaataacgagggcgccgacggagtgggtaattcctcgggaaattggcattgcgattccacatggatgggcggcagagtcatcaccaccagcacccgcacctgggccctgcccacctacaacaaccatctgtacaagcaaatctccagccagtctggagccagcaacgacaaccactactttggctacagcaccccctgggggtattttgacttcaacagattccactgccacttctccccacgtgactggcaaagactcatcaacaacaactggggattccggcccaagagactcagcttcaagctctttaacattcaagtcaaagaggtcacgcagaatgacggtacgacgacgattgccaataaccttaccagcacggttcaggtgtttactgactcggagtaccagctcccgtacgtcctcggctcggcgcatcaaggatgcctcccgccgttcccagcagacgtcttcatggtgccacagtatggatacctcaccctgaacaacggcagtcaggcggtaggacgctcttccttttactgcctggagtactttccttctcagacgcttcgtaccggaaacaactttaccttcagctacacctttgaagacgttcctttccatagcagctacgctcacagccaaagtctggaccgtctcatgaatcctctcatcgaccagtacctgtattacttgagcagaacaaacactccaagcggaaccaccacgatgtccaggcttcagttttctcaggccggagcaagtgacattcgggaccagtctagaaactggcttcctggaccctgttaccgccagcagcgagtatcaaagacagctgcggacaacaacaacagtgattactcgtggactggagctaccaagtaccacctcaatggaagagactctctggtgaatccgggcccagctatggccagccacaaggacgatgaagaaaaatattttcctcagagcggggttctcatctttggaaaacaagactcgggaaaaactaatgtggacattgaaaaggttatgattacagacgaagaggaaatcaggaccaccaatcccgtggctacggagcagtatggttctgtatctaccaacctccagagcggcaacacacaagcagctacctcagatgtcaacacacaaggcgttcttccaggcatggtctggcaggacagagacgtgtacctgcaggggcccatctgggcaaagattccacacacggacggacattttcacccctctcccctcatgggcggattcggacttaaacaccctcctccacaaattctcatcaagaacaccccggtacctgcgaatccttcgaccactttcagtgcggcaaagtttgcttccttcatcacacagtactccacggggcaggtcagcgtggagatcgagtgggagctgcagaaggagaacagcaaacgctggaatcccgaaattcagtacacttccaactacaacaaatctgttaatgtggactttactgtggacactaatggtgtgtattcagagcctcgccccattggcaccagatacctgactcgtaatctgtaa

SEQ ID NO: 215 - protein, 735 aa, Adeno-associated virus
MAADGYLPDWLEDTLSEGIRQWWKLKPGPPPPKPAERHKDDSRGLVLPGYKYLGPFNGLDKGEPVNEADAAALEHDKAYDRQLDSGDNPYLKYNHADAEFQERLKGDTSFGGNLGRAVFQAKKRILEPLGLVEEPVKTAPGKKRPVEHSPAEPDSSSGTGKAGQQPARKRLNFGQTGDADSVPDPQPLGQPPAAPSGLGTNTMASGSGAPMADNNEGADGVGNSSGNWHCDSTWMGGRVITTSTRTWALPTYNNHLYKQISSQSGASNDNHYFGYSTPWGYFDFNRFHCHFSPRDWQRLINNNWGFRPKRLSFKLFNIQVKEVTQNDGTTTIANNLTSTVQVFTDSEYQLPYVLGSAHQGCLPPFPADVFMVPQYGYLTLNNGSQAVGRSSFYCLEYFPSQTLRTGNNFTFSYTFEDVPFHSSYAHSQSLDRLMNPLIDQYLYYLSRTNTPSGTTTMSRLQFSQAGASDIRDQSRNWLPGPCYRQQRVSKTAADNNNSDYSWTGATKYHLNGRDSLVNPGPAMASHKDDEEKYFPQSGVLIFGKQDSGKTNVDIEKVMITDEEEIRTTNPVATEQYGSVSTNLQSGNTQAATSDVNTQGVLPGMVWQDRDVYLQGPIWAKIPHTDGHFHPSPLMGGFGLKHPPPQILIKNTPVPANPSTTFSAAKFASFITQYSTGQVSVEIEWELQKENSKRWNPEIQYTSNYNKSVNVDFTVDTNGVYSEPRPIGTRYLTRNL

SEQ ID NO: 216 - DNA, 2208 bp, Adeno-associated virus
atggctgccgatggttatcttccagattggctcgaggacactctctctgaaggaataagacagtggtggaagctcaaacctggcccaccaccaccaaagcccgcagagcggcataaggacgacagcaggggtcttgtgcttcctgggtacaagtacctcggacccttcaacggactcgacaagggagagccggtcaacgaggcagacgccgcggccctcgagcacgacaaggcctacgaccggcagctcgacagcggagacaacccgtacctcaagtacaaccacgccgacgcggagtttcaggagcgtcttaaagaagatacgtcttttgggggcaacctcggacgagcagtcttccaggccaaaaagaggattcttgaacctctgggcctggttgaggaacctgttaagacggctccgggaaaaaagaggccggtagagcactctcctgcggagccagactcctcctcgggaaccggaaaagcgggccagcagcctgcaagaaagagattgaattttggtcagactggagacgcagactcagtacctgacccccagcctctcggacagccaccagcagccccctctggtctgggaactaatacgatggcttcaggcagtggcgcaccaatggcagacaataacgagggcgccgacggagtgggtaattcctcgggaaattggcattgcgattccacatggatgggcgacagagtcatcaccaccagcacccgcacctgggccctgcccacctgcaacaaccatctgtacaagcaaatctccagccagtctggagccagcaacgacaaccactactttggctacagcaccccctgggggtattttgacttcaacagattccactgccacttctccccacgtgactggcaaagactcatcaacaacaactggggattccggcccaagagactcagcttcaagctctttaacattcaagtcaaagaggtcacgcagaatgacggtacgacgacgattgccaataaccttaccagcacggttcaggtgtttactgactcggagtaccagctcccgtacgtcctcggctcggcgcatcaaggatgcctcccgccgttcccagcagacgtcttcatggtgccacagtatggatacctcaccctgaacaacggcagtcaggcggtaggacgctcttccttttactgcctggagtattttccttctcagatgcttcgtaccggaaacaactttaccttcagctacacctttgaagacgttcctttccatagcagctacgctcacagccaaagtctggaccgtctcatgaatcctctcatcgaccagtacctgtattacttgagcagaacaaacactccaagcggaaccaccacgatgtccaggcttcagttttctcaggccggagcaagtgacattcgggaccagtctagaaactggcttcctggaccctgttaccgccagcagcgagtatcaaagacagctgcggacaacaacaacagtgattactcgtggactggagctaccaagtaccacctcaatggaagagactctctggtgaatccgggcccagctatggccagccacaaggacgatgaagaaaaatattttcctcagagcggggttctcatctttggaaaacaagactcgggaaaaactaatgtggacattgaaaaggttatgattacagacgaagaggaaatcaggaccaccaatcccgtggctacggagcagtatggttctgtatctacctacctccagagcggcaacacacaagcagctacctcagatgtcaacacacaaggcgttcttccaggcatggtctggcaggacagagacgtgtacctgcgggggcccatctgggcaaagattccacacacggacggacattttcacccctctcccctcatgggcggatttggacttaaacaccctcctccacaaattctcatcaagaacaccccggtacctgcgaatccttcgaccactttcagtgcggcaaagtttgcttccttcatcacacagtactccacggggcaggtcagcgtggagatcgagtgggagctgcagaaggagaacagcaaacgctggaatcccgaaattcagtacacttccaactacaacaaatctgttaatgtggactttactgtggacactaatggtgtgtattcagagcctcgccccattggcaccagatacctgactcgtaatctgtaa

SEQ ID NO: 217 - protein, 735 aa, Adeno-associated virus
MAADGYLPDWLEDTLSEGIRQWWKLKPGPPPPKPAERHKDDSRGLVLPGYKYLGPFNGLDKGEPVNEADAAALEHDKAYDRQLDSGDNPYLKYNHADAEFQERLKEDTSFGGNLGRAVFQAKKRILEPLGLVEEPVKTAPGKKRPVEHSPAEPDSSSGTGKAGQQPARKRLNFGQTGDADSVPDPQPLGQPPAAPSGLGTNTMASGSGAPMADNNEGADGVGNSSGNWHCDSTWMGDRVITTSTRTWALPTCNNHLYKQISSQSGASNDNHYFGYSTPWGYFDFNRFHCHFSPRDWQRLINNNWGFRPKRLSFKLFNIQVKEVTQNDGTTTIANNLTSTVQVFTDSEYQLPYVLGSAHQGCLPPFPADVFMVPQYGYLTLNNGSQAVGRSSFYCLEYFPSQMLRTGNNFTFSYTFEDVPFHSSYAHSQSLDRLMNPLIDQYLYYLSRTNTPSGTTTMSRLQFSQAGASDIRDQSRNWLPGPCYRQQRVSKTAADNNNSDYSWTGATKYHLNGRDSLVNPGPAMASHKDDEEKYFPQSGVLIFGKQDSGKTNVDIEKVMITDEEEIRTTNPVATEQYGSVSTYLQSGNTQAATSDVNTQGVLPGMVWQDRDVYLRGPIWAKIPHTDGHFHPSPLMGGFGLKHPPPQILIKNTPVPANPSTTFSAAKFASFITQYSTGQVSVEIEWELQKENSKRWNPEIQYTSNYNKSVNVDFTVDTNGVYSEPRPIGTRYLTRNL

SEQ ID NO: 218 - DNA, 2208 bp, Adeno-associated virus; identical to SEQ ID NO: 212

SEQ ID NO: 219 - protein, 735 aa, Adeno-associated virus; identical to SEQ ID NO: 213

SEQ ID NO: 220 - DNA, 2208 bp, Adeno-associated virus
atggctgccgatggttatcttccagattggctcgaggacactctctctgaaggaataagacagtggtggaagctcaaacctggcccaccaccaccaaagcccgcagagcggcataaggacggcagcaggggtcttgtgcttcctgggtacaagtacctcggacccttcaacggactcgacaagggagagccggtcaacgaggcagacgccgcggccctcgagcacgacaaggcctacgaccggcagctcaacagcggagacaacccgtacctcaagtacaaccacgccgacgcggagtttcaggagcgccttaaagaagatacgtcttttgggggcaacctcggacgagcagtcttccaggcaaaaaagagggttcttgaacctctgggcctggttgaggagcctgttaaaacggctccgggaaaaaagagaccggtagagcactctcctgcggagccagactcctcctcgggaaccggaaaagcgggccagcagcctgcaagaaagagattgaattttggtcagactggagacgcagactccgtacctgacccccagcctctcggacagccaccagcagccccctctggtctgggatctactacaatggctacaggcagtggcgcaccaatggcagacaataacgagggtgccgatggagtgggtaattcctcaggaaattggcattgcgattcccaatggctgggcgacagagtcatcaccacaagcactcgaacctgggccctgcccacctacaacaaccacctctacaagcaaatctccagccaatcaggagcctcaaacgacaaccactattttggctacagcaccccttgggggtattttgacttcaacagattccactgccacttttcaccacgtgactggcaaagactcatcaacaacaactggggattccgacccaagagactcaacttcaagctctttaacattcaagtcaaagaggtcacgcagaatgacggtacgacgacgattgccaataaccttaccagcacggttcaggtgtttactgactcggagtaccagctcccgtacgtcctcggctcggcgcatcaaggatgcctcccgccgttcccagcggacgtcttcatggtcccacagtatggatacctcaccctgaacaacgggagtcaggcggtaggacgctctcccttttactgcctggagtactttccttctcagatgctgcgtactggaaacaactttcagttcagctacacttttgaagacgtgcctttccacagcagctacgctcacagccagagtctggatcggctgatgaatcctctgatcgaccagtacctgtattatctgaacaagacacaaacaaatagtggaactcttcagcagtctcggctactgtttagccaagctggacccaccaacatgtctcttcaagctaaaaactggctgcctggaccttgctacagacagcagcgtctgtcaaagcaggcaaacgacaacaacaacagcaactttccctggactgcagctacaaagtatcatctaaatggccgggactcgttggttaatccaggaccagctatggccagtcacaaggatgacgaagaaaagtttttccccatgcatggaaccctgatatttggtaaacaaggaacaaatgccaacgacgcggatttggaaaatgtcatgattacagatgaagaagaaatcaggaccaccaatcccgtggctacggagcagtacgggactgtgtcaaataatttgcaaaactcaaacactggtccaactactggaactgtcaatcaccaaggagcgttacctggtatggtgtggcaggatcgagatgtgtaccttcagggacccatttgggccaagattcctcacaccgatggacactttcatccttctccactgatgggaggttttggactcaaacacccgcctcctcagattatgatcaaaaacactcccgttccagccaatcctcctacaaacttcagttctgccaagtttgcttctttcatcacacagtattccacggggcaggtcagcgtggagatcgagtgggagctgcagaaggagaacagcaaacgctggaatcccgaaattcagtacacttccaactacaacaaatctgttaatgtggactttactgtggacaataatggcgtgtactcagagcctcgccccattggcaccagatacctgactcgtaatctgtaa

SEQ ID NO: 221 - protein, 735 aa, Adeno-associated virus
MAADGYLPDWLEDTLSEGIRQWWKLKPGPPPPKPAERHKDGSRGLVLPGYKYLGPFNGLDKGEPVNEADAAALEHDKAYDRQLNSGDNPYLKYNHADAEFQERLKEDTSFGGNLGRAVFQAKKRVLEPLGLVEEPVKTAPGKKRPVEHSPAEPDSSSGTGKAGQQPARKRLNFGQTGDADSVPDPQPLGQPPAAPSGLGSTTMATGSGAPMADNNEGADGVGNSSGNWHCDSQWLGDRVITTSTRTWALPTYNNHLYKQISSQSGASNDNHYFGYSTPWGYFDFNRFHCHFSPRDWQRLINNNWGFRPKRLNFKLFNIQVKEVTQNDGTTTIANNLTSTVQVFTDSEYQLPYVLGSAHQGCLPPFPADVFMVPQYGYLTLNNGSQAVGRSPFYCLEYFPSQMLRTGNNFQFSYTFEDVPFHSSYAHSQSLDRLMNPLIDQYLYYLNKTQTNSGTLQQSRLLFSQAGPTNMSLQAKNWLPGPCYRQQRLSKQANDNNNSNFPWTAATKYHLNGRDSLVNPGPAMASHKDDEEKFFPMHGTLIFGKQGTNANDADLENVMITDEEEIRTTNPVATEQYGTVSNNLQNSNTGPTTGTVNHQGALPGMVWQDRDVYLQGPIWAKIPHTDGHFHPSPLMGGFGLKHPPPQIMIKNTPVPANPPTNFSSAKFASFITQYSTGQVSVEIEWELQKENSKRWNPEIQYTSNYNKSVNVDFTVDNNGVYSEPRPIGTRYLTRNL

SEQ ID NO: 222 - DNA, 2208 bp, Adeno-associated virus
atggctgccgatggttatcttccagattggctcgaggacactctctctgaaggaataagacagtggtggaagctcaaacctggcccaccaccaccaaagcccgcagagcggcataaggacgacagcaggggtcttgtgcttcctgggtacaagtacctcggacccttcaacggactcgacaagggagagccggtcaacgaggcagacgccgcggccctcgagcacgacaaggcctacgaccggcagctcgacagcggagacaacccgtacctcaagtacaaccacgccgacgcggagtttcaggagcgtcttaaagaagatacgtcttttgggggcaacctcggacgagcagtcttccaggccaaaaagaggattcttgaacctctgggcctggttgaggaacctgttaagacggctccgggaaaaaagaggccggtagagcactctcctgcggagccagactcctcctcgggaaccggaaaagcgggccagcagcctgcaagaaagagattgaattttggtcagactggagacgcagactcagtacctgacccccagcctctcggacagccaccagcagccccctctggtctgggaactaatacgatggcttcaggcagtggcgcaccaatggcagacaataacgagggcgccgacggagtgggtaattcctcgggaaattggcattgcgattccacatggatgggcgacagagtcatcaccaccagcacccgcacctgggccctgcccacctacaacaaccatctgtacaagcaaatctccagccagtctggagccagcaacgacaaccactactttggctacagcaccccctgggggtattttgacttcaacagattccactgccacttctccccacgtgactggcaaagactcatcaacaacaactggggattccggcccaagagactcagcttcaagctctttaacattcaagtcaaagaggtcacgcagaatgacggtacgacgacgattgccaataaccttaccagcacggttcaggtgtttactgactcggagtaccagctcccgtacgtcctcggctcggcgcatcaaggatgcctcccgccgttcccagcagacgtcttcatggtgccacagtatggatacctcaccctgaacaacggcagtcaggcggtaggacgctcttccttttactgcctggagtactttccttctcagatgcttcgtaccggaaacaactttaccttcagctacacctttgaagacgttcctttccatagcagctacgctcacagccaaagtctggaccgtctcatgaatcctctcatcgaccagtacctgtattacttgagcagaacaaacactccaagcggaaccaccacgatgtccaggcttcagttttctcaggccggagcaagtgacattcgggaccagtctagaaactggcttcctggaccctgttaccgccagcagcgagtatcaaagacagctgcggacaacaacaacagtgattactcgtggactggagctaccaagtaccacctcaatggaagagactctctggtgaatccgggcccagctatggccagccacaaggacgatgaagaaaaatattttcctcagagcggggttctcatctttggaaaacaagactcgggaaaaactaatgtggacattgaaaaggttatgattacagacgaagaggaaatcaggaccaccaatcccgtggctacggagcagtatggttctgtatctaccaacctccagagcggcaacacacaagcagctacctcagatgtcaacacacaaggcgttcttccaggcatggtctggcaggacagagacgtgtacctgcaggggcccatctgggcaaagattccacacacggacggacattttcacccctctcccctcatgggcggattcggacttaaacaccctcctccacaaattctcatcaagaacaccccggtacctgcgaatccttcgaccactttcagtgcggcaaagtttgcttccttcatcacacagtactccacggggcaggtcagcgtggagatcgagtgggagctgcagaaggagaacagcaaacgctggaatcccgaaattcagtacacttccaactacaacaaatctgttaatgtggactttactgtggacactaatggtgtgtattcagagcctcgccccattggcaccagatacctgactcgtaatctgtaa

SEQ ID NO: 223 - protein, 735 aa, Adeno-associated virus
MAADGYLPDWLEDTLSEGIRQWWKLKPGPPPPKPAERHKDDSRGLVLPGYKYLGPFNGLDKGEPVNEADAAALEHDKAYDRQLDSGDNPYLKYNHADAEFQERLKEDTSFGGNLGRAVFQAKKRILEPLGLVEEPVKTAPGKKRPVEHSPAEPDSSSGTGKAGQQPARKRLNFGQTGDADSVPDPQPLGQPPAAPSGLGTNTMASGSGAPMADNNEGADGVGNSSGNWHCDSTWMGDRVITTSTRTWALPTYNNHLYKQISSQSGASNDNHYFGYSTPWGYFDFNRFHCHFSPRDWQRLINNNWGFRPKRLSFKLFNIQVKEVTQNDGTTTIANNLTSTVQVFTDSEYQLPYVLGSAHQGCLPPFPADVFMVPQYGYLTLNNGSQAVGRSSFYCLEYFPSQMLRTGNNFTFSYTFEDVPFHSSYAHSQSLDRLMNPLIDQYLYYLSRTNTPSGTTTMSRLQFSQAGASDIRDQSRNWLPGPCYRQQRVSKTAADNNNSDYSWTGATKYHLNGRDSLVNPGPAMASHKDDEEKYFPQSGVLIFGKQDSGKTNVDIEKVMITDEEEIRTTNPVATEQYGSVSTNLQSGNTQAATSDVNTQGVLPGMVWQDRDVYLQGPIWAKIPHTDGHFHPSPLMGGFGLKHPPPQILIKNTPVPANPSTTFSAAKFASFITQYSTGQVSVEIEWELQKENSKRWNPEIQYTSNYNKSVNVDFTVDTNGVYSEPRPIGTRYLTRNL

SEQ ID NO: 224 - DNA, 2208 bp, Adeno-associated virus
atggctgccgatggttatcttccagattggctcgaggacactctctctgaaggaataagacagtggtggaagctcaaacctggcccaccaccaccaaagcccgcagagcggcataaggacgacagcaggggtcttgtgcttcctgggtacaagtacctcggacccttcaacggactcgacaagggagagccggtcaacgaggcagacgccgcggccctcgagcacgacaaggcctacgaccggcagctcgacagcggagacaacccgtacctcaagtacaaccacgccgacgcggagtttcaggagcgtcttaaagaagatacgtcttttgggggcaacctcggacgagcagtcttccaggccaaaaagaggattcttgaacctctgggcctggttgaggaacctgttaagacggctccgggaaaaaagaggccggtagagcactctcctgcggagccagactcctcctcgggaaccggaaaagcgggccagcagcctgcaagaaagagattgaattttggtcagactggagacgcagactcagtacctgacccccagcctctcggacagccaccagcagccccctctggtctgggaactaatacgatggcttcaggcagtggcgcaccaatggcagacaataacgagggcgccgacggagtgggtaattcctcgggaaattggcattgcgattccacatggatgggcgacagagtcatcaccaccagcacccgcacctgggccctgcccacctacaacaaccatctgtacaagcaaatctccagccagtctggagccagcaacgacaaccactactttggctacagcaccccctgggggtatttcgacttcaacagattccactgccacttctccccacgtgactggcaaagactcatcaacaacaactggggattccggcccaagagactcagcttcaagctctttaacattcaagtcaaagaggtcacgcagaatgacggtacgacgacgattgccaataaccttaccagcacggttcaggtgtttactgactcggggtaccagctcccgtacgtcctcggctcggcgcatcaaggatgccttccgccgttcccagcagacgtcttcatggtgccacagtatggatacctcaccctgaacaacggcagtcaggcggtaggacgctcttccttttactgcctggagtactttccttctcagatgcttcgtaccggaaacaactttaccttcagctacacctttgaagacgttcctttccatagcagctacgctcacggccaaagtctggaccgtctcatgaatcctctcatcgaccagtacctgtattacttgagcagaacaaacactccaagcggaaccaccacgatgtccaggcttcagttttctcaggccggagcaagtgacgttcgggaccagtctagaaactggcttcctggaccctgttaccgccagcagcgagtatcaaagacagctgcggacaacaacaacagtgattactcgtggactggagctaccaagtaccacctcaatggaagagactctctggtgaatccgggcccagctatggccagccacaaggacgatgaagaaaaatattttcctcagagcggggttctcgtctttggaaaacaagactcgggaaaaactaatgtggacattgaaaaggttatgattacagacgaagaggaaatcaggaccaccaatcccgcggctacggagcagtatggttctgtatctaccaacctccagagcggcaacacacaagcagctacctcagatgtcaacacacaaggcgttcttccaggcatggtctggcaggacagagacgtgtacctgcaggggcccatctgggcaaagattccacacacggacggacattttcacccctctcccctcatgggcggattcggacttaaacaccctcctccacaaattctcatcaagaacaccccggtacctgcgaatccttcgaccactttcagtgcggcaaagtttgtttccttcatcacacagtactccacggggcaggtcagcgtggagatcgagtgggagctgcagaaggagaacagcaaacgctggaatcccgaaattcagtacacttccaactacaacaaatctgttaatgtggactttactgtggacactaatggtgtgtattcagagcctcgccccattggcaccagatacctgactcgtaatctgtaa

SEQ ID NO: 225 - protein, 735 aa, Adeno-associated virus
MAADGYLPDWLEDTLSEGIRQWWKLKPGPPPPKPAERHKDDSRGLVLPGYKYLGPFNGLDKGEPVNEADAAALEHDKAYDRQLDSGDNPYLKYNHADAEFQERLKEDTSFGGNLGRAVFQAKKRILEPLGLVEEPVKTAPGKKRPVEHSPAEPDSSSGTGKAGQQPARKRLNFGQTGDADSVPDPQPLGQPPAAPSGLGTNTMASGSGAPMADNNEGADGVGNSSGNWHCDSTWMGDRVITTSTRTWALPTYNNHLYKQISSQSGASNDNHYFGYSTPWGYFDFNRFHCHFSPRDWQRLINNNWGFRPKRLSFKLFNIQVKEVTQNDGTTTIANNLTSTVQVFTDSGYQLPYVLGSAHQGCLPPFPADVFMVPQYGYLTLNNGSQAVGRSSFYCLEYFPSQMLRTGNNFTFSYTFEDVPFHSSYAHGQSLDRLMNPLIDQYLYYLSRTNTPSGTTTMSRLQFSQAGASDVRDQSRNWLPGPCYRQQRVSKTAADNNNSDYSWTGATKYHLNGRDSLVNPGPAMASHKDDEEKYFPQSGVLVFGKQDSGKTNVDIEKVMITDEEEIRTTNPAATEQYGSVSTNLQSGNTQAATSDVNTQGVLPGMVWQDRDVYLQGPIWAKIPHTDGHFHPSPLMGGFGLKHPPPQILIKNTPVPANPSTTFSAAKFVSFITQYSTGQVSVEIEWELQKENSKRWNPEIQYTSNYNKSVNVDFTVDTNGVYSEPRPIGTRYLTRNL

SEQ ID NO: 226 - DNA, 2208 bp, Adeno-associated virus
atggctgccgatggttatcttccagattggctcgaggacactctctctgaaggaataagacagtggtggaaactcaaacctggcccaccaccaccaaagcccgcagagcggcataaggacgacagcaggggtcttgtgcttcctgggtacaagtacctcggacccttcaacggactcgacaagggagagccggtcaacgaggcagacgccgcggccctcgagcacgacaaggcctacgaccggcagctcgacagcggagacaacccgtacctcaagtacaaccacgccgacgcggagtttcaggagcgccttaaagaagatacgtcttttgggggcaacctcggacgagcagtcttccaggcaaaaaagagggttctggaacctctgagcctggttgaggagcctgttaagacggctccgggaaaaaagaggccggtagagcactctcccgcagagccagattcctcctccggaactggaaagtcgggcaaccagcctgcaagaaagagattgaatttcggtcagactggagactcagactccgtacctgacccccagcctctcggacagccaccagcagccccctctggtctgggaactaatacgatggctacaggcagtggcgcaccaatggcagacaataacgagggcgccgacggagtgggtaattcctcgggaaattggcattgcgattccacatggatgggcgacagagtcatcaccaccagcacccgaacctgggccctgcccacctacaacaaccatctgtacaagcaaatatccagccagtctggagccagcaacgacaatcactactttggctacagcaccccctgggggtattttgacttcaacagattccactgccacttttcaccacgtgactggcaaagactcatcaacaacaactggggattccgacccaagagactcaacttcaagctctttaacattcaagtcaaagaggtcacgcagaatgacggtacgacgacgattgccaataaccttaccagcacggttcaggtgtttactgactcggagtaccagctcccgtacgtcctcggctcggcgcatcaaggatgcctcccgccgttcccagcagacgtcttcatggtgccacagtatggatacctcaccctgaacaacgggagtcaggcagtaggacgctcttcattttactgcctagagtactttccttctcagatgctgcgtaccggaaacaactttaccttcagctacacctttgaggacgttcctttccacagcagctacgctcacagccagagtttggaccgtctcatgaatcctctcatcgaccagtacctgtattacttgagcagaacaaacactccaagcggaaccaccacgcagtccaggcttcagttttctcaggccggagcgagtgacattcaggaccagtctaggaactggcttcctggaccctgttaccgtcagcagcgagtatcaaagacatctgcggataacaacaacagtgaatactcgtggactggagctaccaagtaccacctcaatggcagagactctctggtgaatccgggcccggccatggccagccacaaagacgatgaagaaaagttttttcctcagagcggggttcttatctttgggaagcaaggctcagagaaaacaaatgtggatattgaaaaggtcatgattacagacgaagaggaaatcaggaccaccaatcccgtggctacggagcagtatggttctgtatctaccaacctccagagcggcaacacacaagcagctaccgcagatgtcaacacacaaggcgttcttccaggcatggtcgggcaagacagagacgtgtacctgcaggggcctacttgggcaaagattccacacacggacggacattttcacccctctcccctcatgggcggatttggacttaaacaccctcctccacagattctcatcaagaacaccccggtacctgcgaatccttcgaccaccttcagtgcggcaaagtttgcttccttcattacacagtactccacggggcaggtcagcgtggagatcgagtgggagctgcagaaggagaacagcaaacgctggaatcccgagatccagtacacttccaactacaacaagtctgttaatgtggactttactgtggacactaatggcgtgtattcagagcctcgccccattggcaccagatacctgactcgtaatctgtaa

SEQ ID NO: 227 - protein, 735 aa, Adeno-associated virus
MAADGYLPDWLEDTLSEGIRQWWKLKPGPPPPKPAERHKDDSRGLVLPGYKYLGPFNGLDKGEPVNEADAAALEHDKAYDRQLDSGDNPYLKYNHADAEFQERLKEDTSFGGNLGRAVFQAKKRVLEPLSLVEEPVKTAPGKKRPVEHSPAEPDSSSGTGKSGNQPARKRLNFGQTGDSDSVPDPQPLGQPPAAPSGLGTNTMATGSGAPMADNNEGADGVGNSSGNWHCDSTWMGDRVITTSTRTWALPTYNNHLYKQISSQSGASNDNHYFGYSTPWGYFDFNRFHCHFSPRDWQRLINNNWGFRPKRLNFKLFNIQVKEVTQNDGTTTIANNLTSTVQVFTDSEYQLPYVLGSAHQGCLPPFPADVFMVPQYGYLTLNNGSQAVGRSSFYCLEYFPSQMLRTGNNFTFSYTFEDVPFHSSYAHSQSLDRLMNPLIDQYLYYLSRTNTPSGTTTQSRLQFSQAGASDIQDQSRNWLPGPCYRQQRVSKTSADNNNSEYSWTGATKYHLNGRDSLVNPGPAMASHKDDEEKFFPQSGVLIFGKQGSEKTNVDIEKVMITDEEEIRTTNPVATEQYGSVSTNLQSGNTQAATADVNTQGVLPGMVGQDRDVYLQGPTWAKIPHTDGHFHPSPLMGGFGLKHPPPQILIKNTPVPANPSTTFSAAKFASFITQYSTGQVSVEIEWELQKENSKRWNPEIQYTSNYNKSVNVDFTVDTNGVYSEPRPIGTRYLTRNL

SEQ ID NO: 228 - DNA, 2208 bp, Adeno-associated virus
atggctgccgatggttatcttccagattggctcgaggacactctctctgaaggaataagacagtggtggaagctcaaacctggcccaccaccaccaaagcccgcagagcggcataaggacgacagcaggggtcttgtgcttcctgggtacaagtacctcggacccttcaacggactcgacaagggagagccggtcaacgaggcagacgccgcggccctcgagcacgacaaggcctacgaccggcagctcgacagcggagacaacccgtacctcaagtacaaccacgccgacgcagagtttcaggagcgccttaaagaagatacgtcttttgggggcaacctcggacgagcagtcttccaggcaaaaaagagggttctggaacctctgggcctggttgaggagcctgttaagacggctccgggaaaaaagaggccggtagagcactctcctgcagagccagattcctcctccggaactggaaagtcgggcaaccagcctgcaagaaagagattgaatttcggtcagactggagactcagactccgtacctgacccccagcctctcggacagccaccagcagccccctctggtctgggaactaatacgatggctacaggcagtggcgcaccaatggcagacaataacgagggcgccgacggagtgggtaattcctcgggaaattggcattgcgattccacatggatgggcgacagagtcatcaccaccagcacccgaacctgggccctgcccacctacaacaaccatctgtacaagcaaatatccagccagtctggagccagcaacgacaatcactactttggctacagcaccccctgggggtattttgacttcaacagattccactgccacttttcaccacgtgactggcaaagactcatcaacaacaactggggattccgacccaagagactcaacttcaagctctttaacattcaagtcaaagaggtcacgcagaatgacggtacgacgacgattgccaataaccttaccagcacggttcaggtgtttactgactcggagtaccagctcccgtacgtcctcggctcggcgcatcaaggatgcctcccgccgttcccagcagacgtcttcatggtgccacagtatggatacctcaccctgaacaacgggagtcaggcagtaggacgctcttcattttactgcctagggtactttccttctcagatgctgcgtaccggaaacaactttaccttcagctacacctttgaggacgttcctttccacagcagctacgctcacagccagagtttggaccgtctcatgaatcctctcatcgaccagtacctgtattacttgagcagaacaaacactccaagcggaaccaccacgcagtccaggcttcagttttctcaggccggagcgagtgacattcgggaccagtctaggaactggcttcctggaccctgttaccgtcagcagcgagtatcaaagacatctgcggataacaacaacagtgaatactcgtggactggagctaccaagtaccacctcaatggcagagactctctggtgaatccgggcccggccatggccagccacaaagacgatgaagaaaagttttttcctcagagcggggttcttatctttgggaagcaaggcccagagaaaacaaatgtggatattgaaaaggtcatgattacagacgaagaggaaatcaggaccaccaatcccgtggctacggagcagtatggttctgtatctaccaacctccagagcggcaacacacaagcagctaccgcagatgtcaacacacaaggcgttcttccaggcatggtctggcaagacagagacgtgtacctgcaggggcctatttgggcaaagattccacacacggacggacattttcacccctctcccctcatgggcggatttggacttaaacaccctcctccacagattctcatcaagaacaccccggtacctgcgaatccttcgaccaccttcagtgcggcaaagtttgcttccttcattacacagtactccacggggcaggtcagcgtggagatcgagtgggagctgcagaaggagaacagcaaacgctggaatcccgagatccagtacacttccaactacaacaagtctgttaatgtggactttactgtggacactaatggcgtgtattcagagcctcgccccattggcaccagatacctgactcgtaatctgtaa

SEQ ID NO: 229 - protein, 735 aa, Adeno-associated virus
MAADGYLPDWLEDTLSEGIRQWWKLKPGPPPPKPAERHKDDSRGLVLPGYKYLGPFNGLDKGEPVNEADAAALEHDKAYDRQLDSGDNPYLKYNHADAEFQERLKEDTSFGGNLGRAVFQAKKRVLEPLGLVEEPVKTAPGKKRPVEHSPAEPDSSSGTGKSGNQPARKRLNFGQTGDSDSVPDPQPLGQPPAAPSGLGTNTMATGSGAPMADNNEGADGVGNSSGNWHCDSTWMGDRVITTSTRTWALPTYNNHLYKQISSQSGASNDNHYFGYSTPWGYFDFNRFHCHFSPRDWQRLINNNWGFRPKRLNFKLFNIQVKEVTQNDGTTTIANNLTSTVQVFTDSEYQLPYVLGSAHQGCLPPFPADVFMVPQYGYLTLNNGSQAVGRSSFYCLGYFPSQMLRTGNNFTFSYTFEDVPFHSSYAHSQSLDRLMNPLIDQYLYYLSRTNTPSGTTTQSRLQFSQAGASDIRDQSRNWLPGPCYRQQRVSKTSADNNNSEYSWTGATKYHLNGRDSLVNPGPAMASHKDDEEKFFPQSGVLIFGKQGPEKTNVDIEKVMITDEEEIRTTNPVATEQYGSVSTNLQSGNTQAATADVNTQGVLPGMVWQDRDVYLQGPIWAKIPHTDGHFHPSPLMGGFGLKHPPPQILIKNTPVPANPSTTFSAAKFASFITQYSTGQVSVEIEWELQKENSKRWNPEIQYTSNYNKSVNVDFTVDTNGVYSEPRPIGTRYLTRNL

SEQ ID NO: 230 - protein, 735 aa, Adeno-associated virus
MAADGYLPDWLEDTLSEGIRQWWKLKPGPPPPKPAERHKDDSRGLVLPGYKYLGPFNGLDKGEPVNEADAAALEHDKAYDRQLDSGDNPYLKYNHADAEFQERLKEDTSFGGNLGRAVFQAKKRVLEPLGLVEEPVKTAPGKKRPVEHSPAEPDSSSGTGKSGNQPARKRLNFGQTGDSDSVPDPQPLGQPPAAPSGLGTNTMATGSGAPMADNNEGADGVGNSSGNWHCDSTWMGDRVITTSTRTWALPTYNNHLYKQISSQSGASNDNHYFGYSTPWGYFDFNRFHCHFSPRDWQRLINNNWGFRPKRLNFKLFNIQVKEVTQNDGTTTIANNLTSTVQVFTDSEYQLPYVLGSAHQGCLPPFPADVFMVPQYGYLTLNNGSQAVGRSSFYCLEYFPSQMLRTGNNFTFSYTFEDVPFHSSYAHSQSLDRLMNPLIDQYLYYLSRTNTPSGTTTQSRLQFSQAGASDIRDQSRNWLPGPCYRQQRVSKTSADNNNSEYSWTGATKYHLNGRDSLVNPGPAMASHKDDEEKFFPQSGVLIFGKQGPEKTNVDIEKVMITDEEEIRTTNPVATEQYGSVSTNLQSGNTQAATADVNTQGVLPGMVWQDRDVYLQGPIWAKIPHTDGHFHPSPLMGGFGLKHPPPQILIKNTPVPANPSTTFSAAKFASFITQYSTGQVSVEIEWELQKENSKRWNPEIQYTSNYNKSVNVDFTVDTNGVYSEPRPIGTRYLTRNL

SEQ ID NO: 231 - protein, 735 aa, Adeno-associated virus; identical to SEQ ID NO: 230

SEQ ID NO: 232 - DNA, 2211 bp, Adeno-associated virus
atggctgccgatggttatcttccagattggctcgaggacactctctctgaaggaataagacagtggtggaagctcaaacctggcccaccaccaccaaagcccgcagagcggcataaggacgacagcaggggtcttgtgcttcctgggtacaagtacctcggacccttcaacggactcgacaagggggagccggtcaacgaggcagacgccgcggccctcgagcacgacaaggcctacgaccggcagctcgacagcggagacaacccgtacctcaagtacaaccacgccgacgcagagtttcaggagcgccttaaagaagatacgtcttttgggggcaacctcggacgagcagtcttccaggcgaaaaagagggttcttgaacctctgcggcctggtttgaggaaacctgttaagacggctccgggaaaaaagaggccggtagagcactctcctgtggagccagactcctcctcgggaaccggaaaagcgggccagcagcctgcaagaaaaagattaaattttggtcagactggagacgcagactccgtacctgacccccagcctctcggacagccaccagcagccccctctggtctgggatctactacaatggctacaggcagtggcgcaccaatggcagacaataacgagggtgccgatggagtgggtaattcctcaggaaattggcattgcgattcccaatggctggacgacagagtcatcgccaccagcacccgaacctgggccctgcccacatacaacaaccacctctacaagcaaatctccagccaatcaggagcctgcaacgacaaccactactttggctacagcaccccctgggggtattttgacttcaacagattccactgccacttttcaccacgtgactggcaaagactcatcaacagcaactggggattccggcccaaaagactcaacttcaagctctttaatattcaagtcaaagaggtcacgcagaatgacggtacgacgacgattgccaataaccttaccagcacggttcaggtgtttactgactcggagtaccagctcccgtacgtcccgggctcggcgcatcaaggatgcctcccgccgtttccagcggacgtcttcatggtcccacagtatggatacctcaccctgaacaacgggagtcaggcggtaggacgctcttccttttactgcctggagtactttccttctcagatgctgcgtactggaaacaactttcagttcagctacacttttgaagacgtgcctttccacagcagctacgctcactgccagagtctggatcggctgatgaatcctctgatcgaccagtacctgtattatctgaacaagacacaaacaaatagtggaactcttcagcagtctcggctactgtttagccaagctggaccaaccaacatgtctcttcaagctaaaaactggctgcctggaccttgctacagacagcagcgtctgtcaaaacaggcaaacgacaataacaactgcaactttccctggactgcagctacaaagtatcatctaaatggccgggactcgttggttaatccaggaccagctatggccagtcacaaggatgacgaagaaaagtttttccccatgcatggaaccctgatatttggtaaacaaggaacaaatgccaacgacgcggatttggaaaatgtcatgattacagatgaagaagaaatcaggcccaccaatcccgtggctacggagcagtacgggactgtgtcaaataatttgcaaaactcaaacactggtccaactacaggaactgtcaatcaccaaggagcgttacctggtatggtgtggcaggatcgagacgtgtacctgcagggacccatttgggccaagattcctcacaccgatggacactttcatccttctccactgatgggaggttttggactcaaacacccgcctcctcagatcatgatcaaaagcactcccgttccagccaatcctcccacaaacttcagttctgccaagtttgcttcttccatcacacagtattccacgggacaggtcagcgtggagatcgagtgggagctgcagaaggagaacagcaaacgctggaatcccgaaattcagtacacttccaactacaacaagtctgttaatgtggactttactgtggacactaatggtgtgtattcagagcctcgccccattggcaccagatacctgactcgtaatctgtaa

SEQ ID NO: 233 - protein, 736 aa, Adeno-associated virus
MAADGYLPDWLEDTLSEGIRQWWKLKPGPPPPKPAERHKDDSRGLVLPGYKYLGPFNGLDKGEPVNEADAAALEHDKAYDRQLDSGDNPYLKYNHADAEFQERLKEDTSFGGNLGRAVFQAKKRVLEPLRPGLRKPVKTAPGKKRPVEHSPVEPDSSSGTGKAGQQPARKRLNFGQTGDADSVPDPQPLGQPPAAPSGLGSTTMATGSGAPMADNNEGADGVGNSSGNWHCDSQWLDDRVIATSTRTWALPTYNNHLYKQISSQSGACNDNHYFGYSTPWGYFDFNRFHCHFSPRDWQRLINSNWGFRPKRLNFKLFNIQVKEVTQNDGTTTIANNLTSTVQVFTDSEYQLPYVPGSAHQGCLPPFPADVFMVPQYGYLTLNNGSQAVGRSSFYCLEYFPSQMLRTGNNFQFSYTFEDVPFHSSYAHCQSLDRLMNPLIDQYLYYLNKTQTNSGTLQQSRLLFSQAGPTNMSLQAKNWLPGPCYRQQRLSKQANDNNNCNFPWTAATKYHLNGRDSLVNPGPAMASHKDDEEKFFPMHGTLIFGKQGTNANDADLENVMITDEEEIRPTNPVATEQYGTVSNNLQNSNTGPTTGTVNHQGALPGMVWQDRDVYLQGPIWAKIPHTDGHFHPSPLMGGFGLKHPPPQIMIKSTPVPANPPTNFSSAKFASSITQYSTGQVSVEIEWELQKENSKRWNPEIQYTSNYNKSVNVDFTVDTNGVYSEPRPIGTRYLTRNL

SEQ ID NO: 234 - DNA, 2208 bp, Adeno-associated virus
atggctgccgatggttatcttccagattggctcgaggacactctctctgaaggaataagacagtggtggaagctcaaacctggcccaccaccaccaaagcccgcagagcggcataaggacgacagcaggggtcttgtgcttcctgggtacaagtacctcggacccttcaacggactcgacaagggagagccggtcaacgaggcagacgccgcggccctcgagcacgacaaggcctacgaccggcagctcgacagcggagacaacccgtacctcaagtacaaccacgccgacgcggagtttcaggagcgccttaaagaggatacgtcttttgggggcaacctcggacgagcagtcttccaggcaaaaaagagggttctggaacctctgggcctggttgaggagcctgttaagacggctccgggaaaaaagaggccggtagagcactctcctgcagagccagattcctcctccggaactggaaagtcgggcaaccagcctgcaagaaagagattgaatttcggtcagactggagactcagactccgtacctgacccccagcctctcggacagccaccagcagccccctctggtctgggaactaatacgatggctacaggcagtggcgcaccaatggcagacaataacgagggcgccgacggagtgggtaattcctcgggaaattggcattgcgattccacatggatgggcgacagagtcatcaccaccagcacccgaacctgggccctgcccacctacaacaaccatctgtacaagcaaatatccagccagtctggagccagcaacgacaatcactactttggctacagcaccccctgggggtattttgacttcaacagattccactgccacttttcaccacgtgactggcaaagactcatcaacaacaactggggattccgacccaagagactcaacttcaagctctttaacattcaagtcaaagaggtcacgcagaatgacggtacgacgacgattgccaataaccttaccagcacggttcaggtgtttactgactcggagtaccagctcccgtacgtcctcggctcggcgcatcaaggatgcctcccgccgttcccagcagacgtcttcatggtgccacagtatggatacctcaccctgaacaacgggagtcaggcagtaggacgctcttcattttactgcctagagtactttccttctcagatgctgcgtaccggaaacagctttaccttcagctacacctttgaggacgttcctttccacagcagctacgctcacagccagagtttggaccgtctcatgaatcctctcatcgaccagtacctgtattacttgagcagaacaaacactccaagcggaaccaccacgcagtccaggcttcagttttctcaggccggagcgagtgacattcgggaccagtctaggaactggcttcctggaccctgttaccgtcagcagcgagtatcaaagacatctgcggataacaacaacagtgaatactcgtggactggagctaccaagtaccacctcaatggcagagactctctggtgaatccgggcccggccatggccagccacaaagacgatgaagaaaagttctttcctcagagcggggttcttatctttgggaagcaaggctcagagaaaacaaatgtggatattgaaaaggtcatgattacagacgaagaggaaatcaggaccaccaatcccgtggctacggagcagtatggttctgtatctaccaacctccagagcggcaacacacaagcagctaccgcagatgtcaacacacaaggcgttcttccaggcatggtctggcaagacagagacgtgtacctgcaggggcctatttgggcaaagattccacacacggacggacattttcacccctctcccctcatgggcggatttggacttaaacaccctcctccacagattctcatcaagaacaccccggtacctgcgaatccttcgaccaccttcagtgcggcaaagtttgcttccttcattacacagtactccacggggcaggtcagcgtggagatcgagtgggagctgcagaaggagaacagcaaacgctggaatcccgagatccagtacacttccaactacaacaagtctgttaatgtggactttactgtggacactaatggcgtgtattcagagcctcgccccattggcaccagatacctgactcgtaatctgtaa

SEQ ID NO: 235 - protein, 735 aa, Adeno-associated virus
MAADGYLPDWLEDTLSEGIRQWWKLKPGPPPPKPAERHKDDSRGLVLPGYKYLGPFNGLDKGEPVNEADAAALEHDKAYDRQLDSGDNPYLKYNHADAEFQERLKEDTSFGGNLGRAVFQAKKRVLEPLGLVEEPVKTAPGKKRPVEHSPAEPDSSSGTGKSGNQPARKRLNFGQTGDSDSVPDPQPLGQPPAAPSGLGTNTMATGSGAPMADNNEGADGVGNSSGNWHCDSTWMGDRVITTSTRTWALPTYNNHLYKQISSQSGASNDNHYFGYSTPWGYFDFNRFHCHFSPRDWQRLINNNWGFRPKRLNFKLFNIQVKEVTQNDGTTTIANNLTSTVQVFTDSEYQLPYVLGSAHQGCLPPFPADVFMVPQYGYLTLNNGSQAVGRSSFYCLEYFPSQMLRTGNSFTFSYTFEDVPFHSSYAHSQSLDRLMNPLIDQYLYYLSRTNTPSGTTTQSRLQFSQAGASDIRDQSRNWLPGPCYRQQRVSKTSADNNNSEYSWTGATKYHLNGRDSLVNPGPAMASHKDDEEKFFPQSGVLIFGKQGSEKTNVDIEKVMITDEEEIRTTNPVATEQYGSVSTNLQSGNTQAATADVNTQGVLPGMVWQDRDVYLQGPIWAKIPHTDGHFHPSPLMGGFGLKHPPPQILIKNTPVPANPSTTFSAAKFASFITQYSTGQVSVEIEWELQKENSKRWNPEIQYTSNYNKSVNVDFTVDTNGVYSEPRPIGTRYLTRNL

SEQ ID NO: 236 - DNA, 2211 bp, Adeno-associated virus; identical to SEQ ID NO: 126

SEQ ID NO: 237 - protein, 736 aa, Adeno-associated virus
MAADGYLPDWLEDTLSEGIRQWWKLKPGPPPPKPAERHKDDSRGLVLPGYKYLGPGNGLDKGEPVNAADAAALEHDKAYDQQLKAGDNPYLKYNHADAEFQERLKEDTSFGGNLGRAVFQAKKRLLEPLGLVEEAAKTAPGKKRPVEQSPQEPDSSAGIGKSGSQPAKKKLNFGQTGDTESVPDPQPIGEPPAAPSGVGSLTMASGGGAPVADNNEGADGVGSSSGNWHCDSQWLGDRVITTSTRTWALPTYNNHLYKQISNSTSGGSSNDNAYFGYSTPWGYFDFNRFHCHFSPRDWQRLINNNWGFRPKRLNFKLFNIQVKEVTDNNGVKTIANNLTSTVQVFTDSDYQLPYVLGSAHEGCLPPFPADVFMIPQYGYLTLNDGGQAVGRSSFYCLEYFPSQMLRTGNNFQFSYEFENVPFHSSYAHSQSLDRLMNPLIDQYLYYLSKTINGSGQNQQTLKFSVAGPSNMAVQGRNYIPGPSYRQQRVSTTVTQNNNSEFAWPGASSWALNGRNSLMNPGPAMASHKEGEDRFFPLSGSLIFGKQGTGRDNVDADKVMITNEEEIKTTNPVATESYGQVATNHQSAQAQAQTGWVQNQGILPGMVWQDRDVYLQGPIWAKIPHTDGNFHPSPLMGGFGMKHPPPQILIKNTPVPADPPTAFNKDKLNSFITQYSTGQVSVEIEWELQKENSKRWNPEIQYTSNYYKSNNVEFAVSTEGVYSEPRPIGTRYLTRNL

SEQ ID NO: 238 - DNA, 2211 bp, Adeno-associated virus
atggctgccgatggttatcttccagattggctcgaggacactctctctgaaggaataagacagtggtggaagctcaaacctggcccaccaccaccaaagcccgcagagcggcataaggacgacagcaggggtcttgtgcttcctgggtacaagtacctcggacccggcaacggactcgacaagggggagccggtcaacgcagcagacgcggcggccctcgagcacgacaaggcctacgaccagcagctcaaggccggagacaacccgtacctcaagtacaaccacgccgacgccgagttccaggagcggctcaaagaagatacgtcttttgggggcaacctcgggcgagcagtcttccaggccaaaaagaggcttcttgaacctcttggtctggttgaggaagcggctaagacggctcctggaaagaagaggcctgtagagcagtctcctcaggaaccggactcctccgcgggtattggcaaatcgggttcacagcccgctaaaaagaaactcaatttcggtcagactggcgacacagagtcagtccccgaccctcaaccaatcggagaacctcccgcagccccctcaggtgtgggatctcttacaatggcttcaggtggtggcgcaccagtggcagacaataacgaaggtgccgatggagtgggtagttcctcgggaaattggcattgcgattcccaatggctgggggacagagtcatcaccaccagcacccgaacctgggccctgcccacctacaacaatcacctctacaagcaaatctccaacagcacatctggaggatcttcaaatgacaacgcctacttcggctacagcaccccctgggggtattttgacttcaacagattccactgccacttctcaccacgtgactggcagcgactcatcaacaacaactggggattccggcctaagcgactcaacttcaagctcttcaacattcaggtcaaagaggttacggacaacaatggagtcaagaccatcgccaataaccttaccagcacggtccaggtcttcacggactcagactatcagctcccgtacgtgctcgggtcggctcacgagggctgcctcccgccgttcccagcggacgttttcatgattcctcagtacgggtatctgacgcttaatgatgggagccaggccgtgggtcgttcgtccttttactgcctggaatatttcccgtcgcaaatgctaagaacgggtaacaacttccagttcagctacgagtttgagaacgtacctttccatagcagctacgctcacagccaaagcctggaccgactaatgaatccactcatcgaccaatacttgtactatctctcaaagactattaacggttctggacagaatcaacaaacgctaaaattcagcgtggccggacccagcaacatggctgtccagggaagaaactacatacctggacccagctaccgacaacaacgtgtctcaaccactgtgactcaaaacaacaacagcgaatttgcttggcctggagcttcttcttgggctctcaatggacgtaatagcttgatgaatcctggacctgctatggccagccacaaagaaggagaggaccgtttctttcctttgtctggatctttaatttttggcaaacaaggaactggaagagacaacgtggatgcggacaaagtcatgataaccaacgaagaagaaattaaaactactaacccggtagcaacggagtcctatggacaagtggccacaaaccaccagagtgcccaagcacaggcgcagaccggctgggttcaaaaccaaggaatacttccgggtatggtttggcaggacagagatgtgtacctgcaaggacccatttgggccaaaattcctcacacggacggcaactttcacccttctccgctaatgggagggtttggaatgaagcacccgcctcctcagatcctcatcaaaaacacacctgtacctgcggatcctccaacggctttcaataaggacaagctgaactctttcatcacccagtattctactggccaagtcagcgtggagattgagtgggagctgcagaaggaaaacagcaagcgctggaacccggagatccagtacacttccaactattacaagtctaataatgttgaatttgctgttaatactgaaggtgtatatagtgaaccccgccccattggcaccagatacctgactcgtaatctgtaa

SEQ ID NO: 239 - protein, 736 aa, Adeno-associated virus
MAADGYLPDWLEDTLSEGIRQWWKLKPGPPPPKPAERHKDDSRGLVLPGYKYLGPGNGLDKGEPVNAADAAALEHDKAYDQQLKAGDNPYLKYNHADAEFQERLKEDTSFGGNLGRAVFQAKKRLLEPLGLVEEAAKTAPGKKRPVEQSPQEPDSSAGIGKSGSQPAKKKLNFGQTGDTESVPDPQPIGEPPAAPSGVGSLTMASGGGAPVADNNEGADGVGSSSGNWHCDSQWLGDRVITTSTRTWALPTYNNHLYKQISNSTSGGSSNDNAYFGYSTPWGYFDFNRFHCHFSPRDWQRLINNNWGFRPKRLNFKLFNIQVKEVTDNNGVKTIANNLTSTVQVFTDSDYQLPYVLGSAHEGCLPPFPADVFMIPQYGYLTLNDGSQAVGRSSFYCLEYFPSQMLRTGNNFQFSYEFENVPFHSSYAHSQSLDRLMNPLIDQYLYYLSKTINGSGQNQQTLKFSVAGPSNMAVQGRNYIPGPSYRQQRVSTTVTQNNNSEFAWPGASSWALNGRNSLMNPGPAMASHKEGEDRFFPLSGSLIFGKQGTGRDNVDADKVMITNEEEIKTTNPVATESYGQVATNHQSAQAQAQTGWVQNQGILPGMVWQDRDVYLQGPIWAKIPHTDGNFHPSPLMGGFGMKHPPPQILIKNTPVPADPPTAFNKDKLNSFITQYSTGQVSVEIEWELQKENSKRWNPEIQYTSNYYKSNNVEFAVNTEGVYSEPRPIGTRYLTRNL

SEQ ID NO: 240 - DNA, 2208 bp, Adeno-associated virus
atggctgccgatggttatcttccagattggctcgaggacactctctctgaaggaataagacagcggtggaagctcaaacctggcccaccaccaccagagcccgcagagcggcataaggacgacagcaggggtcttgtgcttcctgggtacaagtacctcggacccttcaacggactcgacaagggagagccggtcaacgaggcagacgccgcggccctcgagcacgacaaagcctacgaccggcagctcgacagcggagacaacccgtacctcaagtacaaccacgccgacgcggagtttcaggagcgccttaaagaagatacgtcttttgggggcaacctcggacgagcagtcttccaggcgaaaaagagggtacttgaacctctgggcctggttgaggaacctgttaagacggctccgggaaaaaagaggccggtagagcactctcctgtggagccagactcctcctcgggaaccggaaaggcgggccagcagcctgcaagaaaaagattgaattttggtcagactggagacgcagactcagtacctgacccccagcctctcggacagccaccagcagccccctctggtctgggaactaatacgatggctacaggcagtggcgcaccaatggcagacaataacgagggcgccgacggagtgggtaattcctcgggaaattggcattgcgattccacatggatgggcgacagagtcatcaccaccagcacccgaacctgggccctgcccacctacaacaaccacctctacaaacaaatttccagccaatcaggagcctcgaacgacaatcactactttggctacagcaccccttgggggtattttgacttcaacagattccactgccacttttcaccacgtgactggcaaagactcatcaacaacaactggggattccgacccaagagactcaacttcaagctctttaacattcaagtcaaagaggtcacgcagaatgacggtacgacgacgattgccaataaccttaccggcacggttcaggtgtttactgactcggagtaccagctcccgtacgtcctcggctcggcgcatcaaggatgcctcccgccgttcccagcagacgtcttcatggtgccacagtatggatacctcaccctgaacaacgggagtcaggcagtaggacgctcttcattttactgcctggagtactttccttctcagatgctgcgtaccggaaacaactttaccttcagctacacttttgaggacgttcctttccacagcagctacgctcacagccagagtctgggccgtctcatgaatcctctcatcgaccagtacctgtattacttgagcagaacaaacactccaagtggaaccaccacgcagtcaaggcttcagttttctcaggccggagcgagtgacattcgggaccagtctaggaactggcttcctggaccctgttaccgccagcagcgagtatcaaagacatctgcggataacaacaacagtgaatactcgtggactggagctaccaagtaccacctcaatggcagagactctctggtgaatccgggcccggccatggcaagccacaaggacgatgaagaaaagttttttcctcagagcggggttctcatctttgggaagcaaggctcagagaaaacaaatgtggacattgaaaaggtcatgattacagacgaagaggaaatcaggacaaccaatcccgtggctacggagcagtatggttctgtatctaccaacctccagagaggcaacagacaagcagctaccgcagatgtcaacacacaaggcgttcttccaggcatggtctggcaggacagagatgtgtaccttcaggggcccatctgggcaaagattccacacacggacggacattttcacccctctcccctcatgggtggattcggacttaaacaccctcctccacagattctcatcaagaacaccccggtacctgcgaatccttcgaccaccttcagtgcggcaaagtttgcttccttcatcacacagtactccacgggacaggtcagcgtggagatcgagtgggagctgcagaaggaaaacagcaaacgctggaatcccgaaattcagtacacttccaactacaacaagtctgttaatgtggactttactgtggacactaatggcgtgtattcagagcctcgccccattggcaccagatacctgactcgtaatctgtaa

SEQ ID NO: 241 - protein, 735 aa, Adeno-associated virus
MAADGYLPDWLEDTLSEGIRQRWKLKPGPPPPEPAERHKDDSRGLVLPGYKYLGPFNGLDKGEPVNEADAAALEHDKAYDRQLDSGDNPYLKYNHADAEFQERLKEDTSFGGNLGRAVFQAKKRVLEPLGLVEEPVKTAPGKKRPVEHSPVEPDSSSGTGKAGQQPARKRLNFGQTGDADSVPDPQPLGQPPAAPSGLGTNTMATGSGAPMADNNEGADGVGNSSGNWHCDSTWMGDRVITTSTRTWALPTYNNHLYKQISSQSGASNDNHYFGYSTPWGYFDFNRFHCHFSPRDWQRLINNNWGFRPKRLNFKLFNIQVKEVTQNDGTTTIANNLTGTVQVFTDSEYQLPYVLGSAHQGCLPPFPADVFMVPQYGYLTLNNGSQAVGRSSFYCLEYFPSQMLRTGNNFTFSYTFEDVPFHSSYAHSQSLGRLMNPLIDQYLYYLSRTNTPSGTTTQSRLQFSQAGASDIRDQSRNWLPGPCYRQQRVSKTSADNNNSEYSWTGATKYHLNGRDSLVNPGPAMASHKDDEEKFFPQSGVLIFGKQGSEKTNVDIEKVMITDEEEIRTTNPVATEQYGSVSTNLQRGNRQAATADVNTQGVLPGMVWQDRDVYLQGPIWAKIPHTDGHFHPSPLMGGFGLKHPPPQILIKNTPVPANPSTTFSAAKFASFITQYSTGQVSVEIEWELQKENSKRWNPEIQYTSNYNKSVNVDFTVDTNGVYSEPRPIGTRYLTRNL

SEQ ID NO: 242 - DNA, 2208 bp, Adeno-associated virus
atggctgccgatggttatcttccagattggctcgaggacactctctctgaaggaataagacagcggtggaagctcaaacctggcccaccaccaccagagcccgcagagcggcataaggacgacagcaggggtcttgtgcttcctgggtacaagtacctcggacccttcaacggactcgacaagggagagccggtcaacgaggcagacgccgcggccctcgagcacgacaaagcctacgaccggcagctcgacagcggagacaacccgtacctcaagtacaaccacgccgacgcggagtttcaggagcgccttaaagaagatacgtcctttgggggcaacctcggacgagcagtcttccaggcgaaaaagagggtacttgaacctctgggcctggttgaggaacctgttaagacggctccgggaaaaaagaggccggtagagcactctcctgtggagccagactcctcctcgggaaccggaaaggcgggccagcagcctgcaagaaaaagattgaattttggtcagactggagacgcagactcagtacctgacccccagcctctcggacagccaccagcagccccctctggtctgggaactaatacgatggctacaggcagtggcgcaccaatggcagacaataacgagggcgccgacggagtgggtaattcctcgggaaattggcattgcgattccacatggatgggcgacagagtcatcaccaccagcacccgaacctgggccctgcccacctacaacaaccacctctacaaacaaatttccagccaatcaggagcctcgaacgacaatcactactttggctacagcaccccttgggggtattttgacttcaacagattccactgccacttttcaccacgtgactggcaaagactcatcaacaacaactggggattccgacccaagagactcaacttcaagctctttaacattcaagtcaaagaggtcacgcagaatgacggtacgacgacgattgccaataaccttaccagcacggttcaggtgtttactgactcggagtaccagctcccgtacgtcctcggctcggcgcatcaaggatgcctcccgccgttcccagcagacgtcttcatggtgccacagtatggatacctcaccctgaacaacgagagtcaggcagtaggacgctcttcattttactgcctggagtactttccttctcagatgctgcgtaccggaaacaactttaccttcagctacacttttgaggacgttcctttccacagcagctacgctcacagccagagtctgggccgtctcatgaatcctctcatcgaccagtacctgtattacttgagcagaacaaacactccaagtggaaccaccacgcagtcaaggcttcagttttctcaggccggagcgagtgacattcgggaccagtctaggaactggcttcctggaccctgttaccgccagcagcgagtatcaaagacatctgcggataacaacaacagtgaatactcgtggactggagctaccaagtaccacctcaatggcagagactctctggtgaatccgggcccggccatggcaagccacaaggacgatgaagaaaagttttttcctcagagcggggttctcatctttgggaagcaaggctcagagaaaacaaatgtggacattgaaaaggtcatgattacagacgaagaggaaatcaggacaaccaatcccgtggctacggagcagtatggttctgtatctaccaacctccagagaggcaacagacaagcagctaccgcagatgtcaacacacaaggcgttcttccaggcatggtctggcaggacagagatgtgtaccttcaggggcccatctgggcaaagattccacacacggacggacattttcacccctctcccctcatgggtggattcggacttaaacaccctcctccacagattctcatcaagaacaccccggtacctgcgaatccttcgaccaccttcagtgcggcaaagtttgcttccttcatcacacagtactccacgggacaggtcagcgtggagatcgagtgggagctgcagaaggaaaacagcaaacgctggaatcccgaaattcagtacacttccaactacaacaagtctgttaatgtggactttactgtggacactaatggcgtgtattcagagcctcgccccattggcaccagatacctgactcgtaatctgtaa

SEQ ID NO: 243 - protein, 735 aa, Adeno-associated virus
MAADGYLPDWLEDTLSEGIRQRWKLKPGPPPPEPAERHKDDSRGLVLPGYKYLGPFNGLDKGEPVNEADAAALEHDKAYDRQLDSGDNPYLKYNHADAEFQERLKEDTSFGGNLGRAVFQAKKRVLEPLGLVEEPVKTAPGKKRPVEHSPVEPDSSSGTGKAGQQPARKRLNFGQTGDADSVPDPQPLGQPPAAPSGLGTNTMATGSGAPMADNNEGADGVGNSSGNWHCDSTWMGDRVITTSTRTWALPTYNNHLYKQISSQSGASNDNHYFGYSTPWGYFDFNRFHCHFSPRDWQRLINNNWGFRPKRLNFKLFNIQVKEVTQNDGTTTIANNLTSTVQVFTDSEYQLPYVLGSAHQGCLPPFPADVFMVPQYGYLTLNNESQAVGRSSFYCLEYFPSQMLRTGNNFTFSYTFEDVPFHSSYAHSQSLGRLMNPLIDQYLYYLSRTNTPSGTTTQSRLQFSQAGASDIRDQSRNWLPGPCYRQQRVSKTSADNNNSEYSWTGATKYHLNGRDSLVNPGPAMASHKDDEEKFFPQSGVLIFGKQGSEKTNVDIEKVMITDEEEIRTTNPVATEQYGSVSTNLQRGNRQAATADVNTQGVLPGMVWQDRDVYLQGPIWAKIPHTDGHFHPSPLMGGFGLKHPPPQILIKNTPVPANPSTTFSAAKFASFITQYSTGQVSVEIEWELQKENSKRWNPEIQYTSNYNKSVNVDFTVDTNGVYSEPRPIGTRYLTRNL

SEQ ID NO: 244 - DNA, 2208 bp, Adeno-associated virus
atggctgccgatggttatcttccagattggctcgaggacactctctctgaaggaataagacagcggtggaagctcaaacctggcccaccaccaccagagcccgcagagcggcataaggacgacagcaggggtcttgtgcttcctgggtacaagtacctcggacccttcaacggactcgacaagggagagccggtcaacgaggcagacgccgcggccctcgagcacgacaaagcctacgaccggcagctcgacagcggagacaacccgtacctcaagtacaaccacgccgacgcggagtttcaggagcgccttaaagaagatacgtcttttgggggcaacctcggacgagcagtcttccaggcgaaaaagagggtacttgaacctctgggcctggttgaggaacctgttaagacggctccgggaaaaaagaggccggtagagcactctcctgtggagccagactcctcctcgggaaccggaaaggcgggccagcagcctgcaagaaaaagattgaattttggtcagactggagacgcagactcagtacctgacccccagcctctcggacagccaccagcagccccctctggtctgggaactaatacgatggctacaggcagtggcgcaccaatggcagacaataacgagggcgccgacggagtgggtaattcctcgggaaattggcattgcgattccacatggatgggcgacagagtcatcaccaccagcacccgaacctgggccctgcccacctacaacaaccacctctacaaacaaatttccagccaatcaggagcctcgaacgacaatcactactttggctacagcaccccttgggggtattttgacttcaacagattccactgccacttttcaccacgtgactggcaaagactcatcaacaacaactggggattccgacccaagagactcaacttcaagctctttaacattcaagtcaaagaggtcacgcagaatgacggtacgacgacgattgccaataaccttaccagcacggttcaggtgtttactgactcggagtaccagctcccgtacgtcctcggctcggcgcatcaaggatgcctcccgccgttcccagcagacgtcttcatggtaccacagtatggatacctcaccctgaacaacgggagtcaggcagtaggacgctcttcattttactgcctggagtactttccttctcagatgctgcgtaccggaaacaactttaccttcagctacacttttgaggacgttcctttccacagcagctacgctcacagccagagtctgggccgtctcatgaatcctctcatcgaccagtacctgtattacttgagcagaacaaacactccaagtggaaccaccacgcagtcaaggcttcagttttctcaggccggagcgagtgacattcgggaccagtctaggaactggcttcctggaccctgttaccgccagcagcgagtatcaaagacatctgcggataacaacaacagtgaatactcgtggactggagctaccaagtaccacctcaatggcagagactctctggtgaatccgggcccggccatggcaagccacaaggacgatgaagaaaagttttttcctcagagcggggttctcatctttgggaagcaaggctcagagaaaacaaatgtggacattgaaaaggtcatgattacagacgaagaggaaatcaggacaaccaatcccgtggctacggagcagtatggttctgtatctaccaacctccagagaggcaacagacaagcagctaccgcagatgtcaacacacaaggcgttcttccaggcatggtctggcaggacagagatgtgtaccttcaggggcccatctgggcaaagattccacacacggacggacattttcacccctctcccctcatgggtggattcggacttaaacaccctcctccacagattctcatcaagaacaccccggtacctgcgaatccttcgaccaccttcagtgcggcaaagtttgcttccttcatcacacagtactccacgggacaggtcagcgtggagatcgagtgggagctgcagaaggaaaacagcaaacgctggaatcccgaaattcagtacacttccaactacaacaagtctgttaatgtggactttactgtggacactaatggcgtgtattcagagcctcgccccattggcaccagatacctgactcgtaatctgtaa

SEQ ID NO: 245 - protein, 735 aa, Adeno-associated virus
MAADGYLPDWLEDTLSEGIRQRWKLKPGPPPPEPAERHKDDSRGLVLPGYKYLGPFNGLDKGEPVNEADAAALEHDKAYDRQLDSGDNPYLKYNHADAEFQERLKEDTSFGGNLGRAVFQAKKRVLEPLGLVEEPVKTAPGKKRPVEHSPVEPDSSSGTGKAGQQPARKRLNFGQTGDADSVPDPQPLGQPPAAPSGLGTNTMATGSGAPMADNNEGADGVGNSSGNWHCDSTWMGDRVITTSTRTWALPTYNNHLYKQISSQSGASNDNHYFGYSTPWGYFDFNRFHCHFSPRDWQRLINNNWGFRPKRLNFKLFNIQVKEVTQNDGTTTIANNLTSTVQVFTDSEYQLPYVLGSAHQGCLPPFPADVFMVPQYGYLTLNNGSQAVGRSSFYCLEYFPSQMLRTGNNFTFSYTFEDVPFHSSYAHSQSLGRLMNPLIDQYLYYLSRTNTPSGTTTQSRLQFSQAGASDIRDQSRNWLPGPCYRQQRVSKTSADNNNSEYSWTGATKYHLNGRDSLVNPGPAMASHKDDEEKFFPQSGVLIFGKQGSEKTNVDIEKVMITDEEEIRTTNPVATEQYGSVSTNLQRGNRQAATADVNTQGVLPGMVWQDRDVYLQGPIWAKIPHTDGHFHPSPLMGGFGLKHPPPQILIKNTPVPANPSTTFSAAKFASFITQYSTGQVSVEIEWELQKENSKRWNPEIQYTSNYNKSVNVDFTVDTNGVYSEPRPIGTRYLTRNL

SEQ ID NO: 246 - DNA, 2208 bp, Adeno-associated virus
atggctgccgatggttatcttccagattggctcgaggacactctctctgaaggaataagacagcggtggaagctcaaacctggcccaccaccaccagagcccgcagagcggcataaggacgacagcaggggtcttgtgcttcctgggtacaagtacctcggacccttcaacggactcgacaagggagagccggtcaacgaggcagacgccgcggccctcgagcacgacaaagcctacgaccggcagctcgacagcggagacaacccgtacctcaagtacaaccacgccgacgcggagtttcaggagcgccttaaagaagatacgtcttttgggggcaacctcggacgagcagtcttccaggcgaaaaagagggtactcgaacctctgggcctggttgaggaacctgttaagacggctccgggaaaaaagaggccggtagagcactctcctgtggagccagactcctcctcgggaaccggaaaggcgggccagcagcctgcaagaaaaagattgaattttggtcagactggagacgcagactcagtacctgacccccagcctctcggacagccaccagcagccccctctggtctgggaactaatacgatggctacaggcagtggcgcaccaatggcagacaataacgagggcgccgacggagtgggtaattcctcgggaaattggcattgcgattccacatggatgggcgacagagtcatcaccaccagcacccgaacctgggccctgcccacctacaacaaccacctctacaaacaaatttccagccaatcaggagcctcgaacgacaatcactactttggctacagcaccccttgggggtattttgacttcaacagattccactgccacttttcaccacgtgactggcaaagactcatcaacaacaactggggattccgacccaagagactcaacttcaagctctttaacattcaagtcaaagaggtcacgcagaatgacggtacgacgacgattgccaataaccttaccagcacggttcaggtgtttactgactcggagtaccagctcccgtacgtcctcggctcggcgcatcaaggatgcctcccgccgttcccagcagacgtcttcatggtgccacagtatggatacctcaccctgaacaacgggagtcaggcagcaggacgctcttcattttactgcctggagtactttccttctcagatgctgcgtaccggaaacaactttaccttcagctacacttttgaggacgttcctttccacagcagctacgctcacagccagagtctgggccgtctcatgaatcctctcatcgaccagtacctgtattacttgagcagaacaaacactccaagtggaaccaccacgcagtcaaggcttcagttttctcaggccggagcgagtgacattcgggaccagtctaggaactggcttcctggaccctgttaccgccagcagcgagtatcaaagacatctgcggataacaacaacagtgaatactcgtggactggagctaccaagtaccacctcaatggcagagactctctggtgaatccgggcccggccatggcaagccacaaggacgatgaagaaaagttttttcctcagagcggggttctcatctttgggaagcaaggctcagagaaaacaaatgtggacattgaaaaggtcatgattacagacgaagaggaaatcaggacaaccaatcccgtggctacggagcagtatggttctgtatctaccaacctccagagaggcaacagacaagcagctaccgcagatgtcaacacacaaggcgttcttccaggcatggtctggcaggacagagatgtgtaccttcaggggcccatctgggcaaagattccacacacggacggacattttcacccctctcccctcatgggtggattcggacttaaacaccctcctccacagattctcatcaagaacaccccggtacctgcgaatccttcgaccaccttcagtgcggcaaagtttgcttccttcatcacacagtactccacgggacaggtcagcgtggagatcgagtgggagctgcagaaggaaaacagcaaacgctggaatcccgaaattcagtacacttccaactacaacaagtccgttaatgtggactttactgtggacactaatggcgtgtattcagagcctcgccccattggcaccagatacctgactcgtaatctgtaa

SEQ ID NO: 247 - protein, 735 aa, Adeno-associated virus
MAADGYLPDWLEDTLSEGIRQRWKLKPGPPPPEPAERHKDDSRGLVLPGYKYLGPFNGLDKGEPVNEADAAALEHDKAYDRQLDSGDNPYLKYNHADAEFQERLKEDTSFGGNLGRAVFQAKKRVLEPLGLVEEPVKTAPGKKRPVEHSPVEPDSSSGTGKAGQQPARKRLNFGQTGDADSVPDPQPLGQPPAAPSGLGTNTMATGSGAPMADNNEGADGVGNSSGNWHCDSTWMGDRVITTSTRTWALPTYNNHLYKQISSQSGASNDNHYFGYSTPWGYFDFNRFHCHFSPRDWQRLINNNWGFRPKRLNFKLFNIQVKEVTQNDGTTTIANNLTSTVQVFTDSEYQLPYVLGSAHQGCLPPFPADVFMVPQYGYLTLNNGSQAAGRSSFYCLEYFPSQMLRTGNNFTFSYTFEDVPFHSSYAHSQSLGRLMNPLIDQYLYYLSRTNTPSGTTTQSRLQFSQAGASDIRDQSRNWLPGPCYRQQRVSKTSADNNNSEYSWTGATKYHLNGRDSLVNPGPAMASHKDDEEKFFPQSGVLIFGKQGSEKTNVDIEKVMITDEEEIRTTNPVATEQYGSVSTNLQRGNRQAATADVNTQGVLPGMVWQDRDVYLQGPIWAKIPHTDGHFHPSPLMGGFGLKHPPPQILIKNTPVPANPSTTFSAAKFASFITQYSTGQVSVEIEWELQKENSKRWNPEIQYTSNYNKSVNVDFTVDTNGVYSEPRPIGTRYLTRNL

SEQ ID NO: 248 - protein, 738 aa, Adeno-associated virus; identical to SEQ ID NO: 90

SEQ ID NO: 249 - DNA, 2217 bp, Adeno-associated virus
atggctgctgacggttatcttccagattggctcgaggacaacctctctgagggcattcgcgagtggtgggacctgaaacctggagcccccaagcccaaggccaaccagcagaagcaggacgacggccggggtctggtgcttcctggctacaagtacctcggacccttcaacggactcgacaagggggagcccgtcaacgcggcggacgcagcggccctcgagcacgacaaggcctacgaccagcagctcaaagcgggtgacaatccgtacctgcggtataaccacgccgacgccgagtttcaggagcgtctgcaagaagatacgtcttttgggggcaacctcgggcgagcagtcttccaggccaagaagcgggttctcgaacctctcggtctggttgaggaagctgctaagacggctcctggaaagaagagaccggtagaaccgtcacctcagcgttcccccgactcctccacgggcatcggcaagaaaggccagcagcccgctaaaaagagactgaactttggtcagactggcgactcagagtcagtccccgaccctcaaccaatcggagaaccaccagcaggcccctctggtctgggatctggtacaatggctgcaggcggtggcgctccaatggcagacaataacgaaggcgccgacggagtgggtagttcctcaggaaattggcattgcgattccacatggctgggcgacagagtcatcaccaccagcacccgaacctgggccctgcccacctacaacaaccacctctacaagcaaatatccaatgggacatcgggaggaagcaccaacgacaacacctacttcggctacagcaccccctgggggtattttgacttcaacagattccactgccacttctcaccacgtgactggcagcgactcatcaacaacaactggggattccggccaaaaagactcagcttcaagctcttcaacatccaggtcaaggaggtcacgcagaatgaaggcaccaagaccatcgccaataaccttaccagcacgattcaggtatttacggactcggaataccagctgccgtacgtcctcggctccgcgcaccagggctgcctgcctccgttcccggcggacgtcttcatgattccccagtacggctaccttacactgaacaatggaagtcaagccgtaggccgttcctccttctactgcctggaatattttccatctcaaatgctgcgaactggaaacaattttgaattcagctacaccttcgaggacgtgcctttccacagcagctacgcacacagccagagcttggaccgactgatgaatcctctcatcgaccagtacctgtactacttatccagaactcagtccacaggaggaactcaaggtacccagcaattgttattttctcaagctgggcctgcaaacatgtcggctcaggctaagaactggctacctggaccttgctaccggcagcagcgagtctctacgacactgtcgcaaaacaacaacagcaactttgcttggactggtgccaccaaatatcacctgaacggaagagactctttggtaaatcccggtgtcgccatggcaacccacaaggacgacgaggaacgcttcttcccgtcgagtggagtcctgatgttcggaaaacagggtgctggaagagacaatgtggactacagcagcgttatgctaaccagcgaagaagaaattaaaaccactaaccccgtagccacagaacaatacggtgtggtggctgacaacttgcagcaaaccaatacagggcctattgtgggaaatgtcaacagccaaggagccttacctggcatggtctggcagaaccgagacgtgtacctgcagggtcccatctgggccaagattcctcacacggacggcaacttccacccttcaccgctaatgggaggatttggactgaagcacccacctcctcagatcctgatcaagaacacgccggtacctgcggatcctccaacaacgttcagccaggcgaaattggcttccttcattacgcagtacagcaccggacaggtcagcgtggaaatcgagtgggagctgcagaaggagaacagcaaacgctggaacccagagattcagtacacttcaaactactacaaatctacaaatgtggactttgctgtcaatacagagggaacttattctgagcctcgccccattggtactcgttacctcacccgtaatctgtaa

SEQ ID NO: 250 - protein, 738 aa, Adeno-associated virus
MAADGYLPDWLEDNLSEGIREWWDLKPGAPKPKANQQKQDDGRGLVLPGYKYLGPFNGLDKGEPVNAADAAALEHDKAYDQQLKAGDNPYLRYNHADAEFQERLQEDTSFGGNLGRAVFQAKKRVLEPLGLVEEAAKTAPGKKRPVEPSPQRSPDSSTGIGKKGQQPAKKRLNFGQTGDSESVPDPQPIGEPPAGPSGLGSGTMAAGGGAPMADNNEGADGVGSSSGNWHCDSTWLGDRVITTSTRTWALPTYNNHLYKQISNGTSGGSTNDNTYFGYSTPWGYFDFNRFHCHFSPRDWQRLINNNWGFRPKRLSFKLFNIQVKEVTQNEGTKTIANNLTSTIQVFTDSEYQLPYVLGSAHQGCLPPFPADVFMIPQYGYLTLNNGSQAVGRSSFYCLEYFPSQMLRTGNNFEFSYTFEDVPFHSSYAHSQSLDRLMNPLIDQYLYYLSRTQSTGGTQGTQQLLFSQAGPANMSAQAKNWLPGPCYRQQRVSTTLSQNNNSNFAWTGATKYHLNGRDSLVNPGVAMATHKDDEERFFPSSGVLMFGKQGAGRDNVDYSSVMLTSEEEIKTTNPVATEQYGVVADNLQQTNTGPIVGNVNSQGALPGMVWQNRDVYLQGPIWAKIPHTDGNCHPSPLMGGFGLKHPPPQILIKNTPVPADPPTTFSQAKLASFITQYSTGQVSVEIEWELQKENSKRWNPEIQYTSNYYKSTNVDFAVNTEGTYSEPRPIGTRYLTRNL

SEQ ID NO: 251 - protein, 738 aa, Adeno-associated virus
MAADGYLPDWLEDNLSEGIREWWDLKPGAPKPKANQQKQDDGRGLVLPGYKYLGPFNGLDKGEPVNAADAAALEHDKAYDQQLKAGDNPYLRYNHADAEFQERLQEDTSFGGNLGRAVFQAKKRVLEPLGLVEEGAKTAPGKKRPVEPSPQRSPDSSTGIGKKGQQPARKRLNFGRTGDSESVPDPQPIGEPPAAPSSVGSGTMAAGGGAPMADNNEGADGVGSSSGNWHCDSTWLGDRVITTSTRTWALPTYNNHLYKQISNGTSGGSTNDNTYFGYSTPWGYLDFNRFHCHFSPRDWQRLINNNWGFRPKRLSFKLFNIQVKEVTQNEGTKTIANNLASTIQVFTDSEYQPPYVLGSAHQGCLPPFPADVFMIPQYGYLTLNNGSQAVGRSSFYCLEYFPSQMLRTGNNFSFSYTFEDVPFHSSYAHSQSLDRLMNPLIDQYLYYLSRTQSTGGTAGTQQLLFSRAGPSNMSAQARNWLPGPCYRQQRVSTTLSQNNNSNFAWTGATKYHLNGRDSLVNPGVAMATNKDDEDRFFPSSGILMFGKQGAGKDNVDYSNVMLTSEEEIKTTNPVATEQYGVVADNLQQQNTAPTVGAVNSQGALPGMVWQNRDVYLQGPIWAKIPHTDGNFHPSPLMGGFGLKHPPPQILIKNTPVPADPPTAFNQAKLNSFIAQYSTGQVSVEIEWELQKENSKRWNPEIQYTSNYYKSTNADFAVNTEGVYSEPRPIGTRYLTRNL

SEQ ID NO: 252 - DNA, 2217 bp, Adeno-associated virus
atggctgccgatggttatcttccagattggctcgaggacaacctctctgagggcattcgcgagtggtgggacctgaaacctggagccccgaaacccaaagccaaccagcaaaagcaggacgacggccggggtctggtgcttcctggctacaagtacctcggacccttcaacggactcgacaagggggagcccgtcaacgcggcggacgcagcggccctcgagcacgacaaggcctacgaccagcagctcaaagcgggtgacaatccgtacctgcggtataatcacgccgacgccgagtttcaggagcgtctgcaagaagatacgtcttttgggggcaacctcgggcgagcagtcttccaggccaagaagcgggttctcgaacctctcggtctggttgaggaaggcgctaagacggctcctggaaagaagagaccggtagagccgtcaccacagcgttcccccgactcctccacgggcatcggcaagaaaggccagcagcccgccagaaagagactcaatttcggtcggactggcgactcagagtcagtccccgaccctcaacctatcggagaacctccagcagcgccctctagtgtgggatctggtacaatggctgcaggcggtggcgcaccaatggcagacaataacgaaggtgccgacggagtgggtagttcctcgggaaattggcattgcgattccacatggctgggcgacagagttatcaccaccagcacccgaacctgggccctgcccacctacaacaaccacctctacaagcaaatctccaacgggacctcgggaggcagcaccaacgacaacacctactttggctacagcaccccctgggggtatcttgactttaacagattccactgccacttctcaccacgtgactggcagcgactcatcaacaacaactggggattccggcccaagagactcagcttcaagctcttcaacatccaggtcaaagaggtcacgcagaatgaaggcaccaagaccatcgccaataacctcgccagcaccatccaggtgtttacggactcggaataccagccgccgtacgtcctcggctctgcccaccagggctgcctgcctccgttcccggcggacgtcttcatgattcctcagtacggctacctgactctcaacaacggtagtcaggccgtgggacgttcctccttctactgcctggagtacttcccctctcagatgctgagaacgggcaacaacttttccttcagctacactttcgaggacgtgcctttccacagcagctacgcgcacagccagagtttggacaggctgatgaatcctctcatcgaccagtacctgtactacctgtcaagaacccagtctacgggaggcacagcgggaacccagcagttgctgttttctcgggccgggcctagcaacatgtcggctcaggccagaaactggctgcctggaccctgctacagacagcagcgcgtctccacgacactgtcgcaaaacaacaacagcaactttgcctggactggtgccaccaagtatcatctgaacggcagagactctctggtgaatccgggcgtcgccatggcaaccaacaaggacgacgaggaccgcttcttcccatccagcggcatcctcatgtttggcaagcagggagctggaaaagacaacgtggactatagcaacgtgatgctaaccagcgaggaagaaatcaagaccaccaaccccgtggccacagaacagtatggcgtggtggctgataacctacagcagcaaaacaccgctcctactgtgggggccgtcaacagccagggagccttacctggcatggtctggcagaaccgggacgtgtacctgcagggtcctatttgggccaagattcctcacacagatggcaactttcacccgtctcctttaatgggcggctttggacttaaacatccgcctcctcagatcctcatcaaaaacactcctgttcctgcggatcctccaacagcgttcaaccaggccaagctgaattctttcatcgcgcagtacagcaccggacaagtcagcgtggagatcgagtgggagctgcagaaggagaacagcaagcgctggaacccagagattcagtatacttccaactactacaaatctacaaatgcggactttgctgttaatactgagggtgtttactctgagcctcgccccattggcactcgttacctcacccgtaatctgtaa

SEQ ID NO: 253 - DNA, 2208 bp, Adeno-associated virus
atggctgccgatggttatcttccagattggctcgaggacactctctctgaaggaataagacagtggtggaagctcaaacctggcccaccaccaccaaagcccgcagagcggcataaggacgacagcaggggtcttgtgcttcctgggtacaagtacctcggacccttcaacggactcgacaagggggagccggtcaacgaggcagacgccgcggccctcgagcacgacaaggcctacgaccggcagctcgacagcggagacaacccgtacctcaagtacaaccacgccgacgcagagtttcaggagcgccttaaagaagatacgtcttttgggggcaacctcggacgagcagtcttccaggcgaaaaagagggttcttgaacctctgggcctggttgaggagcctgttaagacggctccgggaaaaaagaggccggtagagcactctcctgtggagccagactcctcctcgggaaccggaaaagcgggccagcagcctgcaagaaaaagattaaattttggtcagactggagacgcagactccgtacctgacccccagcctctcggacagccaccagcagccccctctggtctgggatctactacaatggctacaggcagtggcgcaccaatggcagacaataacgagggtgccgatggagtgggtaattcctcaggaaattggcattgcgattcccaatggctgggcgacagagtcatcaccaccagcacccgaacctgggccctgcccacatacaacaaccacctctacaagcaaatctccagccaatcaggagccagcaacgacaaccactactttggctacagcaccccctgggggtattttgacttcaacagattccactgccacttttcaccacgtgactggcaaagactcgtcaacaacaaccggggattccggcccaaaagactcaacttcaagctctttaatattcaagtcaaagaggtcacgcagaatgacggtacgacgacgattgccaataaccttaccagcacggttcaggtgtttactgactcggagtaccagctcccgtacgtcctgggctcggcgcatcaaggatgcctcccgccgtttccagcggacgtcttcatggtcccacagtatggatacctcaccctgaacaacgggagtcaggcggtaggacgctcttccttttactgcctggagtactttccttctcagatgctgcgtactggaaacaactttcagttcagctacacttttgaagacgtgcctttccacagcagctacgctcacagccagagtctggatcggctgatgaatcctctgatcgaccagtacctgtattatctgaacaagacacaaacaaatagtggaactcttcagcagtctcggctactgtttagccaagctggaccaaccaacatgtctcttcaagctaaaaactggctgcctggaccttgctacagacagcagcgtctgtcaaaacaggcaaacgacaacaacaacagcaactttccctggactgcagctacaaagtatcatctaaatggccgggactcgttggttaatccaggaccagctatggccagtcacaaggatgacgaagaaaagtttttccccatgcatggaaccctgatatttggtaaacaaggaacaaatgccaacgacgcggatttggaaaatgtcatgattacagatgaagaagaaatcagggccaccaatcccgtggctacggagcagtacgggactgtgtcaaataatttgcaaaactcaaacactggtccaactactggaactgtcaatcaccaaggagcgttacctggtatggtgtggcaggatcgagacgtgtacctgcagggacccatttgggccaagattcctcacaccgatggacactttcatccttctccactgatgggaggttttggactcaaacacccgcctcctcagatcatgatcaaaaacactcccgttccagccaatcctcccacaaacttcagttctgccaagtttgcttctttcatcacacagtattccacgggacaggtcagcgtggagatcgagtgggagctgcagaaggagaacagcaaacgctggaatcccgaaattcagtacacttccaactacaacaagtctgttaatgtggactttactgtggacactaatggtgtgtattcagagcctcgccccattggcaccagatacctgactcgtaatctgtaa

SEQ ID NO: 254 - protein, 735 aa, Adeno-associated virus
MAADGYLPDWLEDTLSEGIRQWWKLKPGPPPPKPAERHKDDSRGLVLPGYKYLGPFNGLDKGEPVNEADAAALEHDKAYDRQLDSGDNPYLKYNHADAEFQERLKEDTSFGGNLGRAVFQAKKRVLEPLGLVEEPVKTAPGKKRPVEHSPVEPDSSSGTGKAGQQPARKRLNFGQTGDADSVPDPQPLGQPPAAPSGLGSTTMATGSGAPMADNNEGADGVGNSSGNWHCDSQWLGDRVITTSTRTWALPTYNNHLYKQISSQSGASNDNHYFGYSTPWGYFDFNRFHCHFSPRDWQRLVNNNRGFRPKRLNFKLFNIQVKEVTQNDGTTTIANNLTSTVQVFTDSEYQLPYVLGSAHQGCLPPFPADVFMVPQYGYLTLNNGSQAVGRSSFYCLEYFPSQMLRTGNNFQFSYTFEDVPFHSSYAHSQSLDRLMNPLIDQYLYYLNKTQTNSGTLQQSRLLFSQAGPTNMSLQAKNWLPGPCYRQQRLSKQANDNNNSNFPWTAATKYHLNGRDSLVNPGPAMASHKDDEEKFFPMHGTLIFGKQGTNANDADLENVMITDEEEIRATNPVATEQYGTVSNNLQNSNTGPTTGTVNHQGALPGMVWQDRDVYLQGPIWAKIPHTDGHFHPSPLMGGFGLKHPPPQIMIKNTPVPANPPTNFSSAKFASFITQYSTGQVSVEIEWELQKENSKRWNPEIQYTSNYNKSVNVDFTVDTNGVYSEPRPIGTRYLTRNL

SEQ ID NO: 255 - protein, 738 aa, Adeno-associated virus
MAADGYLPDWLEDNLSEGIREWWDLKPGAPKPKANQQKQDDGRGLVLPGYKYLGPFNGLDKGEPVNAADAAALEHDKAYDQQLKAGDNPYLRYNHADAEFQERLQEDTSFGGNLGRAVFQAKKRVLEPLGLVEEAAKTAPGKKRPVEPSPQRSPDSSTGIGKKGQQPAKKRLSFGQTGDSESVPDPQPIGEPPAGPSGLGSGTMAAGGGAPMADNNEGADGVGSSSGNWHCDSTWLGDRVITTSTRTWALPTYNNHLYKQISNGTSGGSTNDNTYFGYSTPWGYFDFNRFHCHFSPRDWQRLINNNWGFRPKRLSFKLFNIQVKEVTQNEGTKTIANNLTSTIQVFTDSEYQLPYVLGSAHQGCLPPFPADVFMIPQYGYLTLNNGSQAVGRSSFYCLEYFPSQMLRTGNNSEFSYTFEDVPFHSSYAHSQSLDRLMNPLIDQYLYYLSRTQSTGGTQGTQQLLFSQAGPANMSAQAKNWLPGPCYRQQRVSTTLSQNNNSNFAWTGATKYHLNGRDSLVNPGVAMATHKDDEERFFPSSGVLMFGKQGAGRDNVDYSSVMLTSEEEIKTTNPVATEQYGVVADNLQQTNTGPIVGNVNSQGALPGMVWQNRDVYLQGPIWAKIPHTDGNFHPSPLMGGFGLKHPPPQILIKNTPVPADPPTTFSQAKLASFITQYSTGQVSVEIEWELQKENSKRWNPEIQYTSNYYKSTNVDFAVNTEGTYSEPRPIGTRYLTRNL

SEQ ID NO: 256 - DNA, 2217 bp, Adeno-associated virus
atggctgctgacggttatcttccagattggctcgaggacaacctctctgagggcattcgcgagtggtgggacctgaaacctggagcccccaagcccaaggccaaccagcagaagcaggacgacggccggggtctggtgcttcctggctacaagtacctcggacccttcaacggactcgacaagggggagcccgtcaacgcggcggacgcagcggccctcgagcacgacaaggcctacgaccagcagctcaaagcgggtgacaatccgtacctgcggtataaccacgccgacgccgagtttcaggagcgtctgcaagaagatacgtcttttgggggcaacctcgggcgagcagtcttccaggccaagaagcgggttctcgaacctctcggtctggttgaggaagctgctaagacggctcctggaaagaagagaccggtagaaccgtcacctcagcgttcccccgactcctccacgggcatcggcaagaaaggccagcagcccgctaaaaagagactgagctttggtcagactggcgactcagagtcagtccccgaccctcaaccaatcggagaaccaccagcaggcccctctggtctgggatctggtacaatggctgcaggcggtggcgctccaatggcagacaataacgaaggcgccgacggagtgggtagttcctcaggaaattggcattgcgattccacatggctgggcgacagagtcatcaccaccagcacccgaacctgggccctgcccacctacaacaaccacctctacaagcaaatatccaatgggacatcgggaggaagcaccaacgacaacacctacttcggctacagcaccccctgggggtattttgacttcaacagattccactgccacttctcaccacgtgactggcagcgactcatcaacaacaactggggattccggccaaaaagactcagcttcaagctcttcaacatccaggtcaaggaggtcacgcagaatgaaggcaccaagaccatcgccaataaccttaccagcacgattcaggtatttacggactcggaataccagctgccgtacgtcctcggctccgcgcaccagggctgcctgcctccgttcccggcggacgtcttcatgattccccagtacggctaccttacactgaacaatggaagtcaagccgtaggccgttcctccttctactgcctggaatattttccatctcaaatgctgcgaactggaaacaattctgaattcagctacaccttcgaggacgtgcctttccacagcagctacgcacacagccagagcttggaccgactgatgaatcctctcatcgaccagtacctgtactacttatccagaactcagtccacaggaggaactcaaggtacccagcaattgttattttctcaagctgggcctgcaaacatgtcggctcaggctaagaactggctacctggaccttgctaccggcagcagcgagtctctacgacactgtcgcaaaacaacaacagcaactttgcttggactggtgccaccaaatatcacctgaacggaagagactctttggtaaatcccggtgtcgccatggcaacccacaaggacgacgaggaacgcttcttcccgtcgagtggagtcctgatgtttggaaaacagggtgctggaagagacaatgtggactacagcagcgttatgctaaccagcgaagaagaaattaaaaccactaaccctgtagccacagaacaatacggtgtggtggctgacaacttgcagcaaaccaatacagggcctattgtgggaaatgtcaacagccaaggagccttacctggcatggtctggcagaaccgagacgtgtacctgcagggtcccatctgggccaagattcctcacacggacggcaacttccacccttcaccgctaatgggaggatttggactgaagcacccacctcctcagatcctgatcaagaacacgccggtacctgcggatcctccaacaacgttcagccaggcgaaattggcttccttcattacgcagtacagcaccggacaggtcagcgtggaaatcgagtgggagctgcagaaggagaacagcaaacgctggaacccagagattcagtacacttcaaactactacaaatctacaaatgtggactttgctgtcaatacagagggaacttattctgagcctcgccccattggtactcgttacctcacccgtaatctgtaa

SEQ ID NO: 257 - protein, 738 aa, Adeno-associated virus
MAADGYLPDWLEDNLSEGIREWWDLKPGAPKPKANQQKQDDGRGLVLPGYKYLGPFNGLDKGEPVNAADAAALEHDKAYDQQLKAGDNPYLRYNHADAEFQERLQEDTSFGGNLGRAVFQAKKRVLEPLGPVEEAAKTAPGKKRPVEPPPQRSPDSSTGIGKKGQQPAKKRLNFGQTGDSESVPDPQPIGEPPAGPSGLGSGTMAAGGGAPMADNNEGADGVGSSSGNWHCDSTWLGDRVITTSTRTWALPTYNNHLYKQISNGTSGGSTNDNTYFGYSTPWGYFDFNRFHCHFSPRDWQRLINNNWGFRPKRLSFKLFNIQVKEVTQNEGTKTVANNLTSTIQVFTDSEYQLPYVLGSAHQGCLPPFPADVFMIPQYGYLTLNNGSQAVGRSSFYCLEYFPSQMLRTGNNFEFSYTFEDVPFHSSYAHSQSLDRLMNPLIDQYLYYLSRTQSTGGTQGTQQLLFSQAGPANMSAQAKNWLPGPCYRQQRVSTTLSQNNNSNFAWTGATKYHLNGRDSLVNPGVAMATHKDDEERFFPSSGVLMFGKQGAGRDNVDYSSVMLTSEEEIKTTNPVATEQYGVVADNLQQTNTGPIVGNVNSQGALPGMVWQNRDVYLQGPIWAKIPHTDGNFHPSPLMGGFGLKHPPPQILIKNTPVPADPPTTFSQAKLASFITQYSTGQVSVEIEWELQKENSKRWNPEIQYTSNYYKSTNVDFAVNTEGTYSEPRPIGTRYLTRNL

SEQ ID NO: 258 - DNA, 2217 bp, Adeno-associated virus
atggctgctgacggttatcttccagattggctcgaggacaacctctctgagggcattcgcgagtggtgggacctgaaacctggagcccccaagcccaaggccaaccagcagaagcaggacgacggccggggtctggtgcttcctggctacaagtacctcggacccttcaacggactcgacaagggggagcccgtcaacgcggcggacgcagcggccctcgagcacgacaaggcctacgaccagcagctcaaagcgggtgacaatccgtacctgcggtataaccacgccgacgccgagtttcaggagcgtctacaagaagatacgtcttttgggggcaacctcgggcgagcagtcttccaggccaagaagcgggttctcgaacctctcggtccggttgaggaagctgctaagacggctcctggaaagaagagaccggtagaaccgccacctcagcgttcccccgactcctccacgggcatcggcaagaaaggccagcagcccgctaaaaagagactgaactttggtcagactggcgactcagagtcagtccccgaccctcaaccaatcggagaaccaccagcaggcccctctggtctgggatctggtacaatggctgcaggcggtggcgctccaatggcagacaataacgaaggcgccgacggagtgggtagttcctcaggaaattggcattgcgattccacatggctgggcgacagagtcatcaccaccagcacccgaacctgggccctgcccacctacaacaaccacctctacaagcaaatatccaatgggacatcgggaggaagcaccaacgacaacacctacttcggctacagcaccccctgggggtattttgacttcaacagattccactgccacttctcaccacgtgactggcagcgactcatcaacaacaactggggattccggccaaaaagactcagcttcaagctcttcaacatccaggtcaaggaggtcacgcagaatgaaggcaccaagaccgtcgccaataaccttaccagcacgattcaggtatttacggactcggaataccagctgccgtacgtcctcggctccgcgcaccagggctgcctgcctccgttcccggcggacgtcttcatgattccccagtacggctaccttacactgaacaatggaagtcaagccgtaggccgttcctccttctactgcctggaatattttccatctcaaatgctgcgaactggaaacaattttgaattcagctacaccttcgaggacgtgcctttccacagcagctacgcacacagccagagcttggaccgactgatgaatcctctcatcgaccagtacctgtactacttatccagaactcagtccacaggaggaactcaaggtacccagcaattgttattttctcaagctgggcctgcaaacatgtcggctcaggctaagaactggctacctggaccttgctaccggcagcagcgagtctctacgacactgtcgcaaaacaacaacagcaactttgcttggactggtgccaccaaatatcacctgaacggaagagactctttggtaaatcccggtgtcgccatggcaacccacaaggacgacgaggaacgcttcttcccgtcgagtggagtcctgatgtttggaaaacagggtgctggaagagacaatgtggactacagcagcgttatgctaaccagcgaagaagaaattaaaaccactaaccctgtagccacagaacaatacggtgtggtggctgacaacttgcagcaaaccaatacagggcctattgtgggaaatgtcaacagccaaggagccttacctggcatggtctggcagaaccgagacgtgtacctgcagggtcccatctgggccaagattcctcacacggacggcaacttccacccttcaccgctaatgggaggatttggactgaagcacccacctcctcagatcctgatcaagaacacgccggtacctgcggatcctccaacaacgttcagccaggcgaaattggcttccttcattacgcagtacagcaccggacaggtcagcgtggaaatcgagtgggagctgcagaaggagaacagcaaacgttggaacccagagattcagtacacttcaaactactacaaatctacaaatgtggactttgctgtcaatacagagggaacttattctgagcctcgccccattggtactcgttacctcacccgtaatctgtaa

SEQ ID NO: 259 - protein, 738 aa, Adeno-associated virus
MAADGYLPDWLEDNLSEGIREWWDLKPGAPKPKANQQKQDDGRGLVLPGYKYLGPFNGLDKGEPVNAADAAALEHDKAYDQQLKAGDNPYLRYNHADAEFQERLQEDTSFGGNLGRAVFQAKKRVLEPLGLVEEAAKTAPGKKRPVEPSPQRSPDSSTGIGKKGQQPAKKRLNFGQTGDSESVPDPQPIGEPPAGPSGLGSGTMAAGGGAPMADNNEGADGVGSSSGNWHCDSTWLGDRVITTSTRTWALPTYNNHLYKQISNGTSGGSTNDNTYFGYSTPWGYFDFNRFHCHFSPRDWQRLINNNWGFRPKRLSFKLFNIQVKEVTQNEGTKTIANNLTSTIQVFTDSEYQLPYVLGSAHQGCLPPFPADVFMIPQYGYLTLNNGSQAVGRSSFYCLEYFPSQMLRTGNNFEFSYTFEDVPFHSSYAHSQSLDRLMNPLIDQYLYYLSRTQSTGGTQGTQQLLFSQAGPANMSAQAKNWLPGPCYRQQRVSTTLSQSNNSNFAWTGATKYHLNGRDSLVNPGVAMATHKDDEERFFPSSGVLMFGKQGAGRDNVDYSSVMLTSEEEIKTTNPVATEQYGVVADNLQQTNTGPIVGNVNSQGALPGMVWQNRDVYLQGPIWAKIPHTDGNFHPSPLMGGLGLKHPPPQILIKNTPVPADPPTTFSQAKLASFITQYSTGQVSVEIEWELQKENSKRWNPEIQYTSNYYKSTNVDFAVNTEGTYSEPRPIGTRYLTRNL

SEQ ID NO: 260 - DNA, 2217 bp, Adeno-associated virus
atggctgctgacggttatcttccagattggctcgaggacaacctctctgagggcattcgcgagtggtgggacctgaaacctggagcccccaagcccaaggccaaccagcagaagcaggacgacggccggggtctggtgcttcctggctacaagtacctcggacccttcaacggactcgacaagggggagcccgtcaacgcggcggacgcagcggccctcgagcacgacaaggcctacgaccagcagctcaaagcgggtgacaatccgtacctgcggtataaccacgccgacgccgagtttcaggagcgtctgcaagaagatacgtcttttgggggcaacctcgggcgagcagtcttccaggccaagaagcgggttctcgaacctctcggtctggttgaggaagcggctaagacggctcctggaaagaagagaccggtagaaccgtcacctcagcgttcccccgactcctccacgggcatcggcaagaaaggccagcagcccgctaaaaagagactgaactttggtcagactggcgactcagagtcagtccccgaccctcaaccaatcggagaaccaccagcaggcccctctggtctgggatctggtacaatggctgcaggcggtggcgctccaatggcagacaataacgaaggcgccgacggagtgggtagttcctcaggaaattggcattgcgattccacatggctgggcgacagagtcatcaccaccagcacccgaacctgggccctgcccacctacaacaaccacctctacaagcaaatatccaatgggacatcgggaggaagcaccaacgacaacacctacttcggctacagcaccccctgggggtattttgacttcaacagattccactgccacttctcaccacgtgactggcagcgactcatcaacaacaactggggattccggccaaaaagactcagcttcaagctcttcaacatccaggtcaaggaggtcacgcagaatgaaggcaccaagaccatcgccaataaccttaccagcacgattcaggtatttacggactcggaataccagctgccgtacgtcctcggctccgcgcaccagggctgcctgcctccgttcccggcggacgtcttcatgattccccagtacggctaccttacactgaacaatggaagtcaagccgtaggccgttcctccttctactgcctggaatattttccatctcaaatgctgcgaactggaaacaattttgaattcagctacaccttcgaggacgtgcctttccacagcagctacgcacacagccagagcttggaccgactgatgaatcctctcatcgaccagtacctgtactacttatccagaactcagtccacaggaggaactcaaggtacccagcaattgttattttctcaagctgggcctgcaaacatgtcggctcaggctaagaactggctacctggaccttgctaccggcagcagcgagtctctacgacactgtcgcaaagcaacaacagcaactttgcttggactggtgccaccaaatatcacctgaacggaagagactctttggtaaatcccggtgtcgccatggcaacccacaaggacgacgaggaacgcttcttcccgtcgagtggagtcctgatgtttggaaaacagggtgctggaagagacaatgtggactacagcagcgttatgctaaccagcgaagaagaaattaaaaccactaaccctgtagccacagaacaatacggtgtggtggctgacaacttgcagcaaaccaatacagggcctattgtgggaaatgtcaacagccaaggagccttacctggcatggtctggcagaaccgagacgtgtacctgcagggtcccatctgggccaagattcctcacacggacggcaacttccacccttcaccgctaatgggaggacttggactgaagcacccacctcctcagatcctgatcaagaacacgccggtacctgcggatcctccaacaacgttcagccaggcgaaattggcttccttcattacgcagtacagcaccggacaggtcagcgtggaaatcgagtgggagctgcagaaggagaacagcaaacgctggaacccagagattcagtacacttcaaactactacaaatctacaaatgtggactttgctgtcaatacagagggaacttattctgagcctcgccccattggtactcgttacctcacccgtaatctgtaa

SEQ ID NO: 261 - protein, 737 aa, Adeno-associated virus
MAADGYLPDWLEDNLSEGIREWWDLKPGAPKPKANQQKQDDGRGLVLPGYKYLGPFNGLDKGEPVNAADAAALEHDKAYDQQLKAGDNPYPRYNHADAEFQERLQEDTPFGGNLGRAVFQAKKRVLEPLGLVEEAAKTAPGKKRPVEPSPQRSPDSSTGIGKKGQQPAKKRLNFGQTGDSESVPDPQPIGEPPAGPSGLGSGTMAAGGGAPMADNNEGADGVGNASGNWHCDSTWLGDRVITTSTRTWALPTYNNHLYKQISSASTGASNDNHYFGYSTPWGYFDFNRFHCHFSPRDWQRLINNNWGFRPKRLNFKLFNIQVKEVTTNDGVTTIANNLTSTVQVFSDSEYQLPYVLGSAHQGCLPPFPADVFMIPQYGYLTLNNGSQAVGRSSFYCLEYFPSQMLRTGNNFTFSYTFEEVPLHSSYAHSQSLDRLMNPLIVQYLYYLNRTQNQSGSAQNKDLLFSRGSPAGMSVQPKNWLPGPCYRQQRVSKTKTDNNNSNFTWTGASKYNLNGRESIINPGTAMASHKDDEDKFFPMSGVMIFGKESAGASNTALDNVMITDEEEIKATNPVATERFGTVAVNFQSSSTDPATGDVHAMGALPGMVWQDRDVYLQGPIWAKIPHTDGHFHPSPLMGGFGLKNPPPQILIKNTPVPANPPAEFSATKFASFITQYSTGQVSVEIEWELQKENSKRWNPEVQYTSNYAKSASVDFTVDNNGLYTEPRPIGTRYLTRPL

SEQ ID NO: 262 - protein, 737 aa, Adeno-associated virus
MAADGYLPDWLEDNLSEGIREWWDLKPGAPKPKANQQKQDDGRGLVLPGYKYLGPFNGLDKGEPVNAADAAALEHDKAYDQQLKAGDNPYPRYNHADAEFQERLQEDTSFGGNLGRAVFQAKKRVLEPLGLVEEAAKTAPGKKRPVEPSPQRSPDSSTGIGKKGQQPAKKRLNFGQTGDSESVPDPQPIGEPPAGPSGLGSGTMAAGGGAPMADNNEGADGVGNASGNWHCDSTWLGDRVITTSTRTWALPTYNNHLYKQISSASTGASNDNHYFGYSTPWGYFDFNRFHCHFSPRDWQRLINNNWGFRPKRLNFKLFNIQVKEVTTNDGVTTIANNLTSTVQVFSDSEYQLPYVLGSAHQGCLPPFPADVFMIPQYGYLTLNNGSQAVGRSSFYCLEYFPSQMLRTGNNFTFSYTFEEVPLHSSYAHSQSLDRLMNPLIDQYLYYLNRTQNQSGSAQNKDLLFSRGSPAGMSVQPKNWLPGPCYRQQRVSKTKTDNNNSNFTWTGASKYNLNGRESIINPGTAMASHKDDEDKFFPMSGVMIFGKESAGASNTALDNVMITDEEEIKATNPVATERFGTVAVNFQSSSTDPATGDVHAMGALPGMVWQDRDVYLQGPIWAKIPHTDGHFHPSPLMGGFGLKNPPPQILIKNTPVPANPPAEFSATKFASFITQYSTGQVSVEIEWELQKENSKRWNPEVQYTSNYAKSASVDFTVDNNGLYTEPRPIGTRYLTRPL

SEQ ID NO: 263 - DNA, 2214 bp, Adeno-associated virus
atggctgctgacggttatcttccagattggctcgaggacaacctctctgagggcattcgcgagtggtgggacctgaaacctggagcccccaagcccaaggccaaccagcagaagcaggacgacggccggggtctggtgcttcctggctacaagtacctcggacccttcaacggactcgacaagggggagcccgtcaacgcggcggacgcagcggccctcgagcacgacaaggcctacgaccagcagctcaaagcgggtgacaatccgtacccgcggtataaccacgccgacgccgagtttcaggagcgtctgcaagaagatacgccttttgggggcaacctcgggcgagcagtcttccaggccaagaagcgggttctcgaacctctcggtctggttgaggaagctgctaagacggctcctggaaagaagagaccggtagaaccgtcacctcagcgttcccccgactcctccacgggcatcggcaagaaaggccagcagcccgctaaaaagagactgaactttggtcagactggcgactcagagtcagtccccgaccctcaaccaatcggagaaccaccagcaggcccctctggtctgggatctggtacaatggctgcaggcggtggcgctccaatggcagacaataacgaaggcgccgacggagtgggtaatgcctcaggaaattggcattgcgattccacatggctgggcgacagagtcatcaccaccagcacccgcacctgggccttgcccacctacaataaccacctctacaagcaaatctccagtgcttcaacgggggccagcaacgacaaccactacttcggctacagcaccccctgggggtattttgatttcaacagattccactgccacttttcaccacgtgactggcagcgactcatcaacaacaattggggattccggcccaagagactcaacttcaaactcttcaacatccaagtcaaggaggtcacgacgaatgatggcgtcacaaccatcgctaataaccttaccagcacggttcaagtcttctcggactcggagtaccagcttccgtacgtcctcggctctgcgcaccagggctgcctccctccgttcccggcggacgtgttcatgattccgcaatacggctacctgacgctcaacaatggcagccaagccgtgggacgttcatccttttactgcctggaatatttcccttctcagatgctgagaacgggcaacaactttaccttcagctacacctttgaggaagtgcctctccacagcagctacgcgcacagccagagcctggaccggctgatgaatcctctcatcgtccaatacctgtattacctgaacagaactcaaaatcagtccggaagtgcccaaaacaaggacttgctgttcagccgtgggtctccagctggcatgtctgttcagcccaaaaactggctacctggaccctgttatcggcagcagcgcgtttctaaaacaaaaacagacaacaacaacagcaattttacctggactggtgcttcaaaatataacctcaatgggcgtgaatccatcatcaaccctggcactgctatggcctcacacaaagacgacgaagacaagttctttcccatgagcggtgtcatgatttttggaaaagagagcgccggagcttcaaacactgcattggacaatgtcatgattacagacgaagaggaaattaaagccactaaccctgtggccaccgaaagatttgggaccgtggcagtcaatttccagagcagcagcacagaccctgcgaccggagatgtgcatgctatgggagcattacctggcatggtgtggcaagatagagacgtgtacctgcagggtcccatttgggccaaaattcctcacacagatggacactttcacccgtctcctcttatgggcggctttggactcaagaacccgcctcctcagatcctcatcaaaaacacgcctgttcctgcgaatcctccggcggagttttcagctacaaagtttgcttcattcatcacccaatactccacaggacaagtgagtgtggaaattgaatgggagctgcagaaagaaaacagcaagcgctggaatcccgaagtgcagtacacatccaattatgcaaaatctgccagcgttgattttactgtggacaacaatggactttatactgagcctcgccccattggcacccgttaccttacccgtcccctgtaa

SEQ ID NO: 264 - protein, 736 aa, Adeno-associated virus
MAADGYLPDWLEDTLSEGIRQWWKLRPGPPPPKPAERHKDDSRGLVLPGYKYLGPFNGLDKGEPVNEADAAALEHDKAYDRQLDSGDNPYLKYNHADAEFQERLKEDTSFGGNLGRAVFQAKKRVLEPLGLVEEGAETAPGKKRPVEQSPQGPDSSSGIGKTGQQPAKKRLNFGQTGDSESVPDPQPLGEPPATPAAVGPTTMASGGGAPMADNNEGADGVGNASGNWHCDSTWLGDRVITTSTRTWALPTYNNHLYKQISSASTGASNDNHYFGYSTPWGYFDFNRFHCHFSPRDWQRLINNNWGFRPKRLNFKLFNIQVKEVTTNDGVTTIANNLTSTVQVFSDSEYQLPYVLGSAHQGCLPPFPADVFMIPQYGYLTLNNGSQAVGRSSFYCLEYFPSQMLRTGNNFTFSYTFEEVPFHSSYAHSQSLDRLMNPLIDQYLYYPNRTQNQSGSAQNKDLLFSRGSPAGMSVQPKNWLPGPCYRQQRVSKTKTDNNNSNFTWTGASKYNLNGRESIINPGTAMASHKDDEDKFFPMSGVMIFGKESAGASNTALDNVMITDEEEIKATNPVATERFGTVAVNFQSSSTDPATGDVHAMGALPGMVWQGRDVYLQGPIWAKIPHTDGHFHPSPLMGGFGLKNPPPQILIKNTPVPANPPAEFSATKFASFITQYSTGQVSVEIEWELQKENSKRWNPEVQYTSNYAKSANVDFTVDNNGLYTEPRPIGTRYLTRPL

SEQ ID NO: 265 - DNA, 2211 bp, Adeno-associated virus
atggctgccgatggttatcttccagattggctcgaggacactctctctgaaggaataagacagtggtggaagctcagacctggcccaccaccaccaaagcccgcagagcggcataaggacgacagcaggggtcttgtgcttcctgggtacaagtacctcggacccttcaacggactcgacaagggagagccggtcaacgaggcagacgccgcggccctcgagcacgacaaagcctacgaccggcagctcgacagcggagacaacccgtacctcaagtacaaccacgccgacgcggagtttcaggagcgccttaaagaagatacgtcttttgggggcaacctcgggcgagcagtcttccaggccaagaagcgggttctcgaacctctcggtctggttgaggaaggcgctgagacggctcctggaaagaaacgtccggtagagcagtcgccacaagggccagactcctcctcgggcatcggcaagacaggccagcagcccgctaaaaagagactcaattttggtcagactggcgactcagagtcagtccccgatccacaacctctcggagaacctccagcaacccccgctgctgtgggacctactacaatggcttcaggcggtggcgcaccaatggcagacaataacgaaggcgccgacggagtgggtaatgcctcaggaaattggcattgcgattccacatggctgggcgacagagtcatcaccaccagcacccgcacctgggccttgcccacctacaataaccacctctacaagcaaatctccagtgcttcaacgggggccagcaacgacaaccactacttcggctacagcaccccctgggggtattttgatttcaacagattccactgccacttttcaccacgtgactggcagcgactcatcaacaacaattggggattccggcccaagagactcaacttcaaactcttcaacatccaagtcaaggaggtcacgacgaatgatggcgtcacaaccatcgctaataaccttaccagcacggttcaagtcttctcggactcggagtaccagcttccgtacgtcctcggctctgcgcaccagggctgcctccctccgttcccggcggacgtgttcatgattccgcaatacggctacctgacgctcaacaatggcagccaagccgtgggacgttcatccttttactgcctggaatatttcccttctcagatgctgagaacgggcaacaactttaccttcagctacacctttgaggaagtgcctttccacagcagctacgcgcacagccagagcctggaccggctgatgaatcctctcatcgaccaatacctgtattacccgaacagaactcaaaatcagtccggaagtgcccaaaacaaggacttgctgtttagccgtgggtctccagctggcatgtctgttcagcccaaaaactggctacctggaccctgttatcggcagcagcgcgtttctaaaacaaaaacagacaacaacaacagcaattttacctggactggtgcttcaaaatataacctcaatgggcgtgaatccatcatcaaccctggcactgctatggcctcacacaaagacgacgaagacaagttctttcccatgagcggtgtcatgatttttggaaaagagagcgccggagcttcaaacactgcattggacaatgtcatgattacagacgaagaggaaattaaagccactaaccctgtggccaccgaaagatttgggaccgtggcagtcaatttccagagcagcagcacagaccctgcgaccggagatgtgcatgctatgggagcattacctggcatggtgtggcaaggtagagacgtgtacctgcagggtcccatttgggccaaaattcctcacacagatggacactttcacccgtctcctcttatgggcggctttggactcaagaacccgcctcctcagatcctcatcaaaaacacgcctgttcctgcgaatcctccggcggagttttcagctacaaagtttgcttcattcatcacccaatactccacaggacaagtgagtgtggaaattgaatgggagctgcagaaagaaaacagcaagcgctggaatcccgaagtgcagtacacatccaattatgcaaaatctgccaacgttgattttactgtggacaacaatggactttatactgagcctcgccccattggcacccgttaccttacccgtcccctgtaa

SEQ ID NO: 266 - protein, 736 aa, Adeno-associated virus
MAADGYLPDWLEDTLSEGIRQWWKLRPGPPPPKPAERHKDDSRGLVLPGYKYLGPFNGLDKGEPVNEADAAALEHDKAYDRQLDSGDNPYLKYNHADAEFQERLKEDTSFGGNLGRAVFQAKKRVLEPLGLVEEGAKTAPGKKRPVEQSPQGPDSSSGIGKTGQQPAKKRLNFGQTGDSESVPDPQPLGEPPATPAAVGPTTMASGGGAPMADNNEGADGVGNASGNWHCDSTWLGDRVITTSTRTWALPTYNNHLYKQISSASTGASNDNHYFGYSTPWGYFDFNRFHCHFSPRDWQRLINNNWGFRPKRLNFKLFNIQVKEVTTNDGVTTIANNLTSTVQVFSDSEYQLPYVLGSAHQGCLPPFPADVFMIPQYGYLTLNNGSQAVGRSSFYCLEYFPSQMLRTGNNFTFSYTFEEVPFHSSYAHSQSLDRLMNPLIDQYLYYPNRTQNQSGSAQNKDLLFSRGSPAGMSVQPKNWLPGPCYRQQRVSKTKTDNNNSNFTWTGASKYNLNGRESIINPGTAMASHKDDEDKFFPMSGVMIFGKESAGASNTALDNVMITDEEEIKATNPVATERFGTVAVNFQSSSTDPATGDVHAMGALPGMVWQGRDVYLQGPIWAKIPHTDGHFHPSPLMGGFGLKNPPPQILIKNTPVPANPPAEFSATKFASFITQYSTGQVSVEIEWELQKENSKRWNPEVQYTSNYAKSANVDFTVDNNGLYTEPRPIGTRYLTRPL

SEQ ID NO: 267 - protein, 736 aa, Adeno-associated virus
MAADGYLPDWLEDTLSEGIRQWWKLRPGPPPPKPAERHKDDSRGLVLPGYKYLGPFNGLDKGEPVNEADAAALEHDKAYDRQLDSGDNPYLKYNHADAEFQERLKEDTSFGGNLGRAVFQAKKRVLEPLGLVEEGAKTAPGKKRPVEQSPQGPDSSSGIGKTGQQPAKKRLNFGQTGDSESVPDPQPLGEPPATPAAVGPTTMASGGGAPMADNNEGADGVGNASGNWHCDSTWLGDRVITTSTRTWALPTYNNHLYKQISSASTGASNDNHYFGYSTPWGYFDFNRFHCHFSPRDWQRLINNNWGFRPKRLNFKLFNIQVKEVTTNDGVTTIANNLTSTVQVFSDSEYQLPYVLGSAHQGCLPPFPADVFMIPQYGYLTLNNGSQAVGRSSFYCLEYFPSQMLRTGNNFTFSYTFEEVPFHSSYAHSQSLDRLMNPLIDQYLYYLNRTQNQSGSAQNKDLLFSRGSPAGMSVQPKNWLPGPCYRQQRVSKTKTDNNNSNFTWTGASKYNLNGRESIINPGTAMASHKDDEDKFFPMSGVMIFGKESAGASNTALDNVMITDEEEIKATNPVATERFGTVAVNFQSSSTDPATGDVHAMGALPGMVWQGRDVYLQGPIWAKIPHTDGHFHPSPLMGGFGLKNPPPQILIKNTPVPANPPAEFSATKFASFITQYSTGQVSVEIEWELQKENSKRWNPEVQYTSNYAKSANVDFTVDNNGLYTEPRPIGTRYLTRPL

SEQ ID NO: 268 - protein, 736 aa, Adeno-associated virus
MAADGYLPDWLEDTLSEGIRQWWKLRPGPPPPKPAERHKDDSRGLVLPGYKYLGPFNGLDKGEPVNEADAAALEHDKAYDRQLDSGDNPYLKYNHADAEFQERLKEDTSFGGNLGRAVFQAKKRVLEPLGLVEEGAKTAPGKKRPVEQSPQGPDSSSGIGKTGQQPAKKRLNFGQTGDSESVPDPQPLGEPPATPAAVGPTTMASGGGAPMADNNEGADGVGNASGNWHCDSTWLGDRVITTSTRTWALPTYNNHLYKQISSASTGASNDNHYFGYSTPWGYFDFNRFHCHFSPRDWQRLINNNWGFRPKRLNFKLFNIQVKEVTTNDGVTTIANNLTSTVQVFSDSEYQLPYVLGSAHQGCLPPFPADVFMIPQYGYLTLNNGSQAVGRSSFYCLEYFPSQMLRTGNNFTFSYTFEEVPFHSSYAHSQSLDRLMNPLIDQYLYYLNRTQNQSGSAQNKDLLFSRGSPAGMSVQPKNWLPGPCYRQQRVSKTKTDNNNSNFTWTGASKYNLNGRESIINPGTAMASHKDDEDKFFPMSGVMIFGKESAGASNTALDNVMITDEEEIKATNPVATERFGTVAVNFQSSSTDPATGDVHAMGALPGMVWQDRDVYLQGPIWAKIPHTDGHFHPSPLMGGFGLKNPPPQILIKNTPVPANPPAEFSATKFASFITQYSTGQVSVEIEWELQKENSKRWNPEVQYTSNYAKSANVDFTVDNNGLYTEPRPIGTRYLTRPL

SEQ ID NO: 269 - DNA, 2208 bp, Adeno-associated virus
atggctgccgatggctatcttccagattggctcgaggacactctctctgaaggaataagacagtggtggaagctcaaacctggcccaccaccaccaaagcccgcagagcggcatagggacgacagcaggggtcttgtgcttcctgggtacaagtacctcggacccttcaacggactcgacaagggagagccggtcaacgaggcagacgccgcggccctcgagcacgacaaagcctacgaccggcagctcgacagcggagacaacccgtacctcaagtacaaccacgccgacgcggagtttcaggagcgccttaaagaagatacgtcttttgggggcaacctcggacgagcagtcttccaggcgaaaaagagggttcttgaacctctgggcctggttgaggaacctgttaagacggctccgggaaaaaagaggccggtagagcactctcctgtggagccagactcctcctcgggaaccggaaaggcgggccagcagcctgcaagaaaaagattgaattttggtcagactggagacgcagactcagtacctgacccccagcctctcggacagccaccagcagccccctctggtctgggaactaatacgatggctacaggcagtggcgcaccaatggcagacaataacgagggcgccgacggagtgggtaattcctcgggaaattggcattgcgattccacatggatgggcgacagagtcatcaccaccagcacccgaacctgggccctgcccacctacaacaaccacctctacaaacaaatttccagccaatcaggagcctcgaacgacaatcactactttggctacagcaccccttgggggtattttgacttcaacagattccactgccacttttcaccacgtgactggcaaagactcatcaacaacaactggggattccgacccaagagactcaacttcaagctctttaacattcaagtcaaagaggtcacgcagaatgacggtacgacgacgattgccaataaccttaccagcacggttcaggtgtttactgactcggggtaccagctcccgtacgtcctcggctcggcgcatcaaggatgcctcccgccgttcccagcagacgtcttcatggtgccacagtatggataccccaccctgaacaacgggagtcaggcagtaggacgctcttcattttactgcctggagtactttccttctcagatgctgcgtaccggaaacaactttaccttcagctacacttttgaggacgttcctttccacagcagctacgctcacagccagagtctggaccgtctcatgaatcctctcatcgaccagtacctgtattacttgagcacaacaaacactccaagtggaaccaccacgcagtcaaggcttcagttttctcaggccggagcgagtgacattcgggaccagtctaggaactggcttcctggaccctgttaccgccagcagcgagtatcaaagacatctgcggataacaacaacagtgaatactcgtggactggagctaccaagtaccacctcaatggcagagactctctggtgaatccgggcccggccgtggcaagccacaaggacgatgaagaaaagttttttcctcagagcggggttctcatctttgggaagcaaggctcagagaaaacaaatgtggacattgaaaaggtcatgattacagacgaagaggaaatcaggacaaccaatcccgtggctacggagcagtatggttctgtatctaccaacctccagagaggcaacagacaagcagctaccgcagatgtcaacacacaaggcgttcttccaggcatggtctggcaggacagagatgtgtaccttcaggggcccatctgggcaaagattccacacacggacggacattttcacccctctcccctcatgggtggattcggacttaaacaccctcctccacagattctcatcaagaacaccccggtacctgcgaatccttcgaccaccttcagtgcggcaaagtttgcttccttcatcacacagtactccacgggacaggtcagcgtggagatcgagtgggagctgcagaaggaaaacagcaaacgctggaatcccgaaattcagtacacttccaactacaacaagtctgttaatgtggactttactgtggacactaatggcgtgtattcagagcctcgccccattggcaccagatacctgactcgtaatctgtaa

SEQ ID NO: 270 - protein, 735 aa, Adeno-associated virus
MAADGYLPDWLEDTLSEGIRQWWKLKPGPPPPKPAERHRDDSRGLVLPGYKYLGPFNGLDKGEPVNEADAAALEHDKAYDRQLDSGDNPYLKYNHADAEFQERLKEDTSFGGNLGRAVFQAKKRVLEPLGLVEEPVKTAPGKKRPVEHSPVEPDSSSGTGKAGQQPARKRLNFGQTGDADSVPDPQPLGQPPAAPSGLGTNTMATGSGAPMADNNEGADGVGNSSGNWHCDSTWMGDRVITTSTRTWALPTYNNHLYKQISSQSGASNDNHYFGYSTPWGYFDFNRFHCHFSPRDWQRLINNNWGFRPKRLNFKLFNIQVKEVTQNDGTTTIANNLTSTVQVFTDSGYQLPYVLGSAHQGCLPPFPADVFMVPQYGYPTLNNGSQAVGRSSFYCLEYFPSQMLRTGNNFTFSYTFEDVPFHSSYAHSQSLDRLMNPLIDQYLYYLSTTNTPSGTTTQSRLQFSQAGASDIRDQSRNWLPGPCYRQQRVSKTSADNNNSEYSWTGATKYHLNGRDSLVNPGPAVASHKDDEEKFFPQSGVLIFGKQGSEKTNVDIEKVMITDEEEIRTTNPVATEQYGSVSTNLQRGNRQAATADVNTQGVLPGMVWQDRDVYLQGPIWAKIPHTDGHFHPSPLMGGFGLKHPPPQILIKNTPVPANPSTTFSAAKFASFITQYSTGQVSVEIEWELQKENSKRWNPEIQYTSNYNKSVNVDFTVDTNGVYSEPRPIGTRYLTRNL

SEQ ID NO: 271 - DNA, 2211 bp, Adeno-associated virus
atggctgccgacggttatcttccagattggctcgaggacactctctctgaaggaataagacagtggtggaagctcaaacctggcccaccaccaccaaagcccgcagagcggcataaggacgacagcaggggtcttgtgcttcctgggtacaagtacctcggacccttcaacggactcgacaagggagagccggtcaacgaggcagacgccgcggccctcgagcacgacaaagcctacgaccggcagctcgacagcggagacaacccgtacctcaagtacaaccacgccgacgcggagtttcaggagcgccttaaagaagatacgtcttttgggggcaacctcgggcgggcagtcttccaggccaagaagcgggttctcgaacctctcggtctggttgaggaaggcgctaagacggctcctggaaagaaacgtccggtagagcagtcgccacaagagccagactccccctcgggcatcggcaagacaggccagcagcccgctaaaaagagactcaattttggtcagactggcgactcagagtcagtccccgatccacaacctctcggagaacctccagcaacccccgctgctgtgggacctactacaatggcttcaggcggtggcgcaccaatggcagacaataacgaaggcgccgacggagtgggtaatgcctcaggaaattggcactgcgattccacatggctgggcgacagagtcatcaccaccagcacccgcacctgggccttgcccacctacaataaccacctctacaagcaaatctccagtgcttcaacgggggccagcaacgacaaccactacttcggctacagcaccccctgggggtattttgatttcaacagattccactgccacttttcaccacgtgactggcagcgactcatcaacaacaattggggattccggcccaagagactcaacttcaaactcttcaacatccaagtcaaggaggtcacgacgaatgatggcgtcacaaccatcgctaataaccttaccagcacggttcaagtcttctcggactcggagtaccagcttccgtacgtcctcggctctgcgcaccagggccgcctccctccgttcccggcggacgtgttcatgattccgcaatacggctacctgacgctcaacaatggcagccaagccgtgggacgttcatcctcttactgcctggaatatttcccttctcagatgctgagaacgggcaacaactttaccttcagctacacctttgaggaagtgcctctccacagcagctgcgcgcacagccagagcctggaccggctgatgaatcctctcatcgaccaatacctgtattacctgaacagaactcaaaatcagtccggaagtgcccaaaacagggacttgctgttcagccgtgggtctccagctggcatgtctgttcagcccaaaaactggctacctggaccctgttatcggcagcagcgcgtttctaaaacaaaaacagacaacaacaacagcaattttacctggactggtgcttcaaaatataacctcaatgggcgtgaatccatcatcaaccctggcactgctatggcctcacacaaagacgacgaagacaagttctttcccatgagcggtgtcatgatttttggaaaagagagcgccggagcttcaaacactgcattggacaatgtcatgattacagacgaagaggaaattaaagccactaaccctgtggccaccgaaagatttgggaccgtggcagtcaatttccagagcagcagcacagaccctgcgaccggagatgtgcatgctatgggagcattacctggcatggtgtggcaagatagagacgtgtacctgcagggtcccatttgggccaaaattcctcacacagatggacactttcacccgtctcctcttatgggcggctttggactcaagaacccgcctcctcagatcctcatcaaaaacacgcctgttcctgcgaatcctccggcggagttttcagctacaaagtttgcttcattcatcacccaatactccgcaggacaagtgagtgtggaaattgaatgggagctgcagaaagaaaacagcaagcgctggaatcccgaagtgcagtacacatccaattatgcaaaatctgccaacgttgattttactgtggacaacaatggactttatactgagcctcgccccattggcacccgttaccttacccgtcccctgtaa

SEQ ID NO: 272 - protein, 736 aa, Adeno-associated virus
MAADGYLPDWLEDTLSEGIRQWWKLKPGPPPPKPAERHKDDSRGLVLPGYKYLGPFNGLDKGEPVNEADAAALEHDKAYDRQLDSGDNPYLKYNHADAEFQERLKEDTSFGGNLGRAVFQAKKRVLEPLGLVEEGAKTAPGKKRPVEQSPQEPDSPSGIGKTGQQPAKKRLNFGQTGDSESVPDPQPLGEPPATPAAVGPTTMASGGGAPMADNNEGADGVGNASGNWHCDSTWLGDRVITTSTRTWALPTYNNHLYKQISSASTGASNDNHYFGYSTPWGYFDFNRFHCHFSPRDWQRLINNNWGFRPKRLNFKLFNIQVKEVTTNDGVTTIANNLTSTVQVFSDSEYQLPYVLGSAHQGRLPPFPADVFMIPQYGYLTLNNGSQAVGRSSSYCLEYFPSQMLRTGNNFTFSYTFEEVPLHSSCAHSQSLDRLMNPLIDQYLYYLNRTQNQSGSAQNRDLLFSRGSPAGMSVQPKNWLPGPCYRQQRVSKTKTDNNNSNFTWTGASKYNLNGRESIINPGTAMASHKDDEDKFFPMSGVMIFGKESAGASNTALDNVMITDEEEIKATNPVATERFGTVAVNFQSSSTDPATGDVHAMGALPGMVWQDRDVYLQGPIWAKIPHTDGHFHPSPLMGGFGLKNPPPQILIKNTPVPANPPAEFSATKFASFITQYSAGQVSVEIEWELQKENSKRWNPEVQYTSNYAKSANVDFTVDNNGLYTEPRPIGTRYLTRPL

SEQ ID NO: 273 - protein, 736 aa, Adeno-associated virus
MAADGYLPDWLEDTLSEGIRQWWKLKPGPPPPKPAERHKDDSRGLVLPGYKYLGPFNGLDKGEPVNEADAAALEHDKAYDRQLDSGDNPYLKYNHADAEFQERLKEDTSFGGNLGRAVFQAKKRVLEPLGLVEEGAKTAPGKKRPVEQSPQEPDSSSGIGKTGQQPAKKRLNFGQTGDSESVPDPQPLGEPPATPAAVGPTTMASGGGAPMADNNEGADGVGNASGNWHCDSTWLGDRVITTSTRTWALPTYNNHLYKQISSASTGASNDNHYFGYSTPWGYFDFNRFHCHFSPRDWQRLINNNWGFRPKRLNFKLFNIQVKEVTTNDGVTTIANNLTSTVQVFSDSEYQLPYVLGSAHQGCLPPFPADVFMIPQYGYLTLNNGSQAVGRSSFYCLEYFPSQMLRTGNNFTFSYTFEEVPLHSSCAHSQSLDRLMNPLIDQYLYYLNRTQNQSGSAQNRDLLFSRGSPAGMSVQPKNWLPGPCYRQQRVSKTKTDNNNSNFTWTGASKYNLNGRESIINPGTAMASHKDDEDKFFPMSGVMIFGKESAGASNTALDNVMITDEEEIKATNPVATERFGTVAVNFQSSSTDPATGDVHAMGALPGMVWQDRDVYLQGPIWAKIPHTDGHFHPSPLMGGFGLKNPPPQILIKNTPVPANPPAEFSATKFASFITQYSTGQVSVEIEWELQKENSKRWNPEVQYTSNYAKSANVDFTVDNNGLYTEPRPIGTRYLTRPL

SEQ ID NO: 274 - DNA, 2208 bp, Adeno-associated virus
atggctgccgatggctatcttccagattggctcgaggacactctctctgaaggaataagacagtggtggaagctcaaacctggcccaccaccaccaaagcccgcagagcggcatagggacgacagcaggggtcttgtgcttcctgggtacaagtacctcggacccttcaacggactcgacaagggagagccggtcaacgaggcagacgccgcggccctcgagcacgacaaagcctacgaccggcagctcgacagcggagacaacccgtacctcaagtacaaccacgccgacgcggagtttcaggagcgccttaaagaagatacgtcttttgggggcaacctcggacgagcagtcttccaggcgaaaaagagggttcttgaacctctgggcctggttggggaacctgttaagacggctccgggaaaaaagaggccggtagagcactctcctgtggagccagactcctcctcgggaaccggaaaggcgggccagcagcctgcaagaaaaagattgaattttggtcagactggagacgcagactcagtacctgacccccagcctctcggacagccaccagcagccccctctggtctgggaactaatacgatggctacaggcagtggcgcaccaatggcagacaataacgagggcgccgacggagtgggtaattcctcgggaaattggcattgcgattccacatggatgggcgacagagtcatcaccaccagcacccgaacctgggccctgcccacctacaacaaccacctctacaaacaaatttccagccaatcaggagcctcgaacgacagtcactactttggctacagcaccccttgggggtattttgacttcaacagattccactgccacttttcaccacgtgactggcaaagactcatcaacaacaactggggattccgacccaagagactcaacttcaagctctttaacattcaagtcaaagaggtcacgcagaatgacggtacgacgacgattgccaataaccttaccagcacggttcaggtgtttactgactcggagtaccagctcccgtacgtcctcggctcggcgcatcaaggatgcctcccgccgttcccagcagacgtcttcatggtgccacagtatggatacctcaccctgaacaacgggagtcaggcagtaggacgctcttcattttactgcctggagtactttccttctcagatgctgcgtaccggaaacaactttaccttcagctacacttttgaggacgttcctttccacagcagctacgctcacagccagagtctggaccgtctcatgaatcctctcatcgaccagtacctgtattacttgagcacaacaaacactccaagtggaaccaccacgcagtcaaggctccagttttctcaggccggagcgagtgacattcgggaccagtctaggaactggcttcctggaccctgttaccgccagcagcgagtatcaaagacatctgcggataacaacaacagtgaatactcgtggactggagctaccaagtaccacctcaatggcagagactctctggtgaatccgggcccggccatggcaagccacaaggacaatgaagaaaagttttttcctcagagcggggttctcatctttgggaagcaaggctcagagaaaacaaatgtggacattgaaaaggtcatgattacagacgaagaggaaatcaggacaaccaatcccgtggctacggagcagtatggttctgtatctaccaacctccagagaggcaacagacaagcagctaccgcagatgtcaacacacaaggcgttcttccaggcatggtctggcaggacagagatgtgtaccttcaggggcccatctgggcaaagattccacacacggacggacattttcacccctctcccctcatgggtggattcggacttaaacaccctcctccacagattctcatcaagaacaccccggtacctgcgaatccttcgaccaccttcagtgcggcaaagtttgcttccttcatcacacagtactccacgggacaggtcagcgtggagatcgagtgggagctgcagaaggaaaacagcaaacgctggaatcccgaaattcagtacacttccaactacaacaagtctgttaatgtggactttactgtggacactaatggcgtgtattcagagcctcgccccattggcaccagatacctgactcgtaatctgtaa

SEQ ID NO: 275 - protein, 735 aa, Adeno-associated virus
MAADGYLPDWLEDTLSEGIRQWWKLKPGPPPPKPAERHRDDSRGLVLPGYKYLGPFNGLDKGEPVNEADAAALEHDKAYDRQLDSGDNPYLKYNHADAEFQERLKEDTSFGGNLGRAVFQAKKRVLEPLGLVGEPVKTAPGKKRPVEHSPVEPDSSSGTGKAGQQPARKRLNFGQTGDADSVPDPQPLGQPPAAPSGLGTNTMATGSGAPMADNNEGADGVGNSSGNWHCDSTWMGDRVITTSTRTWALPTYNNHLYKQISSQSGASNDSHYFGYSTPWGYFDFNRFHCHFSPRDWQRLINNNWGFRPKRLNFKLFNIQVKEVTQNDGTTTIANNLTSTVQVFTDSEYQLPYVLGSAHQGCLPPFPADVFMVPQYGYLTLNNGSQAVGRSSFYCLEYFPSQMLRTGNNFTFSYTFEDVPFHSSYAHSQSLDRLMNPLIDQYLYYLSTTNTPSGTTTQSRLQFSQAGASDIRDQSRNWLPGPCYRQQRVSKTSADNNNSEYSWTGATKYHLNGRDSLVNPGPAMASHKDNEEKFFPQSGVLIFGKQGSEKTNVDIEKVMITDEEEIRTTNPVATEQYGSVSTNLQRGNRQAATADVNTQGVLPGMVWQDRDVYLQGPIWAKIPHTDGHFHPSPLMGGFGLKHPPPQILIKNTPVPANPSTTFSAAKFASFITQYSTGQVSVEIEWELQKENSKRWNPEIQYTSNYNKSVNVDFTVDTNGVYSEPRPIGTRYLTRNL

SEQ ID NO: 276 - protein, 737 aa, Adeno-associated virus
RMAADGYLPDWLEDNLSEGIREWWDLKPGAPKPKANQQKQDDGRGLVLPGYKYLGPFNGLDKGEPVNAADAAALEHDKAYDQQLKAGDNPYLRYNHADAEFQERLQEDTSFGGNLGRAVFQAKKRVLEPLGLVEEGAKTAPGKKRPVEQSPQEPDSSSGIGKTGQQPAKKRLNFGQTGDSESVPDPQPLGEPPATPAAVGPTTMASGGGAPMADNNEGADGVGNASGNWHCDSTWLGDRVITTSTRTWALPTYNNHLYKQISSTSTGASNDNHYFGYGTPWGYFDFNRFHCHFSPRDWQRLINNNWGFRPKRLNFKLFNIQVEEVTTNDGVTTIANNLTSTVQVFSDSEYQLPYVLGSAHQGCLPPFPADVFMIPQYGYLTLNNGSQAVGRSSFYCLEYFPSQMLRTGNNFTFSYTFEEVPFHSSYAHSQSLDRLMNPLIDQYLYYLNRTQNQSGSAQNKDLLFSRGSPAGMSVQPKNWLPGPCYRQQRVSKTKTDNNNSNFTWTGASKYNLNGRESIINPGTAVASHKDDEDKFFPMSGVMIFGKESAGASSTALDNVMITDEEEIKATNPVATERFGTVAVNFQSSSTDPATGDVHAMGALPGMVWQDRDVYLQGPIWAKIPHTDGHFHPSPLMGGFGLKNPPPQILIKNTPVPANPPAEFSATKFASFITQYSTGQVSVEIEWELQKENSKRWNPEVQYTSNYAKSANVDFTVDNNGLYTEPRPIGTRYLTRPL

SEQ ID NO: 277 - protein, 736 aa, Adeno-associated virus
MAADGYLPDWLEDNLSEGIREWWDLKPGAPKPKANQQKQDDGRGLVLPGYKYLGPFNGLDKGEPVNAADAAALEHDKAYDQQLKAGDNPYLRYNHADAEFQERLQEDTSFGGNLGRAVFQAKKRVLEPLGLVEEGAKTAPGKKRPVEQSPQEPDSSSGIGKTGQQPAKKRLNFGQTGDSESVPDPQPLGEPPATPAAVGPTTMASGGGAPMADNNEGADGVGNASGNWHCDSTWLGDRVITTSTRTWALPTYNNHLYKQISSTSTGASNDNHYFGYGTPWGYFDFNRFHCHFSPRDWQRLINNNWGFRPKRLNFKLFNIQVEEVTTNDGVTTIANNLTSTVQVFSDSEYQLPYVLGSAHQGCLPPFPADVFMIPQYGYLTLNNGSQAVGRSSFYCLEYFPSQMLRTGNNFTFSYTFEEVPFHSSYAHSQSLDRLMNPLIDQYLYYLNRTQNQSGSAQNKDLLFSRGSPAGMSVQPKNWLPGPCYRQQRVSKTKTDNNNSNFTWTGASKYNLNGRESIINPGTAVASHKDDEDKFFPMSGVMIFGKESAGASSTALDNVMITDEEEIKATNPVATERFGTVAVNFQSSSTDPATGDVHAMGALPGMVWQDRDVYLQGPIWAKIPHTDGHFHPSPLMGGFGLKNPPPQILIKNTPVPANPPAEFSATKFASFITQYSTGQVSVEIEWELQKENSKRWNPEVQYTSNYAKSANVDFTVDNNGLYTEPRPIGTRYLTRPL

SEQ ID NO: 278 - DNA, 2211 bp, Adeno-associated virus
atggctgccgatggttatcttccagattggctcgaggacaacctctctgagggcattcgcgagtggtgggacttgaaacctggagccccgaagcccaaagccaaccagcaaaagcaggacgacggccggggtctggtgcttcctggctacaagtacctcggacccttcaacggactcgacaagggggagcccgtcaacgcggcggacgcagcggccctcgagcacgacaaggcctacgaccagcagctcaaagcgggtgacaatccgtacctgcggtataaccacgccgacgccgagtttcaggagcgtctgcaagaagatacgtcttttgggggcaacctcgggcgagcagtcttccaggccaagaagcgggttctcgaacctctcggtctggttgaggaaggcgctaagacggctcctggaaagaaacgtccggtagagcagtcgccacaagagccagactcctcctcgggcatcggcaagacaggccagcagcccgctaaaaagagactcaattttggccagactggcgactcagagtcagtccccgatccacaacctctcggagaacctccagcaacccccgctgctgtgggacctactacaatggcttcaggcggtggcgcaccaatggcagacaataacgaaggcgccgacggagtgggtaatgcctcaggaaattggcattgcgattccacatggctgggcgacagagtcatcaccaccagcacccgcacctgggccttgcccacctacaataaccacctctacaagcaaatctccagtacttcaacgggggccagcaacgacaaccactacttcggctacggcaccccctgggggtattttgatttcaacagattccactgccacttttcaccacgtgactggcagcgactcatcaacaacaattggggattccggcccaagagactcaacttcaaactcttcaacatccaagtcgaggaggtcacgacgaatgatggcgtcacaaccatcgctaataaccttaccagcacggttcaagtcttctcggactcggagtaccagcttccgtacgtcctcggctctgcgcaccagggctgcctccctccgttcccggcggacgtgttcatgattccgcaatacggctacctgacgctcaacaatggcagccaagccgtgggacgttcatccttttactgcctggaatatttcccttctcagatgctgagaacgggcaacaactttaccttcagctacacctttgaggaagtgcctttccacagcagctacgcgcacagccagagcctggaccggctgatgaatcctctcatcgaccaatacctgtattacctgaacagaacacaaaatcagtccggaagtgcccaaaacaaggacttgctgtttagccgtgggtctccagctggcatgtctgttcagcccaaaaactggctacctggaccctgttatcggcagcagcgcgtttctaaaacaaaaacagacaacaacaacagcaattttacctggactggtgcttcaaaatataacctcaatgggcgtgaatccatcatcaaccctggcaccgctgtggcctcacacaaagacgacgaagacaagttctttcccatgagcggtgtcatgatttttggaaaagagagcgccggagcttcaagcactgcattggacaatgtcatgattacagacgaagaggaaattaaagccactaaccctgtggccaccgaaagatttgggaccgtggcagtcaatttccagagcagcagcacagaccctgcgaccggagatgtgcatgctatgggagcattacctggcatggtgtggcaagatagagacgtgtacctgcagggtcccatttgggccaaaattcctcacacagatggacactttcacccgtctcctcttatgggcggctttggactcaagaacccgcctcctcagatcctcatcaaaaacacgcctgttcctgcgaatcctccggcggagttttcagctacaaagtttgcttcattcatcacccaatactccacaggacaagtgagtgtggaaattgaatgggagctgcagaaagaaaacagcaagcgctggaatcccgaagtgcagtacacatccaattatgcaaaatctgccaacgttgattttactgtggacaacaatggactttatactgagcctcgccccattggcacccgttaccttacccgtcccctgtaa

SEQ ID NO: 279 - protein, 737 aa, Adeno-associated virus
RMAADGYLPDWLEDNLSEGIREWWDLKPGAPKPKANQQKQDDGRGLVLPGYKYLGPFNGLDKGEPVNAADAAALEHDKAYDQQLKAGDNPYLRYNHADAEFQERLQEDTSFGGNLGRAVFQAKKRVLEPLGLVEEGAKTAPGKKRPVEQSPQEPDSSSGIGKTGQQPAKKRLNFGQTGDSESVPDPQPLGEPPATPAAVGPTTMASGGGAPMADNNEGADGVGNASGNWHCDSTWLGDRVITTSTRTWALPTYNNHLYKQISSTSTGASNDNHYFGYSTPWGYFDFNRFHCHFSPRDWQRLINNNWGFRPKRLNFKLFNIQVEEVTTNDGVTTIANNLTSTVQVFSDSEYQLPYVLGSAHQGCLPPFPADVFMIPQYGYLTLNNGSQAVGRSSFYCLEYFPSQMLRTGNNFTFSYTFEEVPFHSSYAHSQSLDRLMNPLIDQYLYYLNRTQNQSGSAQNKDLLFSRGSPAGMSVQPKNWLPGPCYRQQRVSKTKTDNNNSNFTWTGASKYNLNGRESIINPGTAVASHKDDEDKFFPMSGVMIFGKESAGASSTALDNVMITDEEEIKATNPVATERFGTVAVNFQSSSTDPATGDVHAMGALPGMVWQDRDVYLQGPIWAKIPHTDGHFHPSPLMGGFGLKNPPPQILIKNTPVPANPPAEFSATKFASFITQYSTGQVSVEIEWELQKENSKRWNPEVQYTSNYAKSANVDFTVDNNGLYTEPRPIGTRYLTRPL

SEQ ID NO: 280 - protein, 737 aa, Adeno-associated virus
RMAADGYLPDWLEDNLSEGIREWWDLKPGAPKPKANQQKQDDGRGLVLPGYKYLGPFNGLDKGEPVNAADAAALEHDKAYDQQLKAGDNPYLRYNHADAEFQERLQEDTSFGGNLGRAVFQAKKRVLEPLGLVEEGAKTAPGKKRPVEQSPQEPDSSSGIGKTGQQPAKKRLNFGQTGDSESVPDPQPLGEPPATPAAVGPTTMASGGGAPMADNNEGADGVGNASGNWHCDSTWLGDRVITTSTRTWALPTYNNHLYKQISSTSTGASNDNHYFGYSTPWGYFDFNRFHCHFSPRDWQRLINNNWGFRPKRLNFKLFNIQVKEVTTNDGVTTIANNLTSTVQVFSDSEYQLPYVLGSAHQGCLPPFPADVFMIPQYGYLTLNNGSQAVGRSSFYCLEYFPSQMLRTGNNFTFSYTFEEVPFHSSYAHSQSLDRLMNPLIDQYLYYLNRTQNQSGSAQNKDLLFSRGSPAGMSVQPKNWLPGPCYRQQRVSKTKTDNNNSNFTWTGASKYNLNGRESIINPGTAVASHKDDEDKFFPMSGVMIFGKESAGASSTALDNVMITDEEEIKATNPVATERFGTVAVNFQSSSTDPATGDVHAMGALPGMVWQDRDVYLQGPIWAKIPHTDGHFHPSPLMGGFGLKNPPPQILIKNTPVPANPPAEFSATKFASFITQYSTGQVSVEIEWELQKENSKRWNPEVQYTSNYAKSANVDFTVDNNGLYTEPRPIGTRYLTRPL

SEQ ID NO: 281 - protein, 737 aa, Adeno-associated virus
RMAADGYLPDWLEDNLSEGIREWWDLKPGAPKPKANQQKQDDGRGLVLPGYKYLGPFNGLDKGEPVNAADAAALEHDKAYDQQLKAGDNPYLRYNHADAEFQERLQEDTSFGGNLGRAVFQAKKRVLEPLGLVEEGAKTAPGKKRPVEQSPQEPDSSSGIGKTGQQPAKKRLNFGQTGDSESVPDPQPLGEPPATPAAVGPTTMASGGGAPMADNNEGADGVGNASGNWHCDSTWLGDRVITTSTRTWALPTYNNHLYKQISSTSTGASNDNHYFGYSTPWGYFDFNRFHCHFSPRDWQRLINNNWGFRPKRLNFKLFNIQVKEVTTNDGVTTIANNLTSTVQVFSDSEYQLPYVLGSAHQGCLPPFPADVFMIPQYGYLTLNNGSQAVGRSSFYCLEYFPSQMLRTGNNFTFSYTFEEVPFHSSYAHSQSLDRLMNPLIDQYLYYLNRTQNQSGSAQNKDLLFSRGSPAGMSVQPKNWLPGPCYRQQRVSKTKTDNNNSNFTWTGASKYNLNGRESIINPGTAVASHKDDEDKFFPMSGVMIFGKESAGANSTALDNVMITDEEEIKATNPVATERFGTVAVNFQSSSTDPATGDVHAMGALPGMVWQDRDVYLQGPIWAKIPHTDGHFHPSPLMGGFGLKNPPPQILIKNTPVPANPPAEFSATKFASFITQYSTGQVSVEIEWELQKENSKRWNPEVQYTSNYAKSANVDFTVDNNGLYTEPRPIGTRYLTRPL

SEQ ID NO: 282 - DNA, 2208 bp, Adeno-associated virus
atggctgccgatggttatcttccagattggctcaaggacactctctctgaaggaataagacagtggtggaagctcaaacctggcccaccaccaccaaagcccgcagagcggcataaggacgacagcgggggtcttgtgcttcctgggtacaagtacctcggacccttcaacggactcgacaagggagagccggtcaacgaggcagacgccgcggccctcgagtacgacaaggcctacgaccggcagctcgacagcggagacaacccgtacctcaagtacaaccacgccgacgcggagtttcaggagcgccttaaagaagatacgtcttttgggggcaacctcggacgagcagtcttccaggcgaaaaagagggttcttgaacctctgggcctggttgaggaacctgttaagacggctccgggaaaaaagaggccggtagagcactctcctgtggagccagactcctcctcgggaacaggaaaagcgggccagcagcctgcgagaaagagattgaattttggtcagactggagacgcagactccgtacctgacccccagcctctcggacagccaccagcagccccctctggtctgggaactaatacgatggctacaggcagtggcgcaccaatggcagacaataacgagggcgccgacggagtgggtaattcctcgggaagttggcattgcgattccacatggatgggcgacagagtcatcaccaccagcacccgaacctgggctctgcccacctacaacaaccatctgtacaagcagatctccagccaatcaggagccagcaacgacaaccactactttggctacagcaccccttgggggtattttgacttcaacagattccactgccacttttcaccacgtgactggcaaagactcatcaacaacaactggggattccggcccaagagactcaacttcaagctctttaacattcaagtcaaggaggtcacgcagaatgacggtacgacgacgattgccaataaccttaccagcacggttcaggtgtttactgactcggagtaccagctcccgtacgtccccggctcggcgcatcaaggatgcctcccgccgttcccagcagacgtcttcatggtgccacagtatggatacctcaccctgaacaacgggagtcaggcagtaggacgctcttcattttactgcctggagtactttccttctcagatgcttcgtaccggaaacaactttaccttcagctacacctttgaggatgttcctttccacagcagctacgctcacagccagagtttggaccgtctcatgaatcctctcatcgaccagtacctgtattacttgagcagaacaaacactccaagcggaaccaccacgcagtccaggcttcagttttctcaggccggagcaagtgacattcgggaccagtctaggaactggcttcctggaccctgttaccgccagcagcgagtatcaaagacagctgcggacaacaacaacagtgaatactcgtggactggagctaccaagtaccacctcaatggcagagactctctggtgaatccgggcccggccatggccagccacaaggacgatgaagaaaagttttttcctcaaagcggggttctcatctttgggaagcaaggctcagagaaaacaaatgtggacattgaaaaggtcatgattacagacgaagaggaaatcagaaccaccaatcccgtggccacggagcagtatggttctgtatctaccaacctccagagcggcaacacacaagcagctactgcagatgtcaacacacaaggcgttcttccaggcatggtctggcaggacagagacgtgcacctgcaggggcctatctgggcaaagattccacacacggacggacattttcacccctctcccctcatgggcggatttggacttaaacaccctcctccacagattctcatcaagaacaccccggtacctgcaaatccttcgaccaccttcagtgcggcaaagtttgcttccttcatcacacagtattccacagggcaggtcagcgtggagatcgagtgggagctgcagaaggagaacagcaaacgctggaaccccgagatccagtacacttccaactacaacaaatctgttaatgtggactttactgtggacactaatggtgtgtattcagagcctcgccccattggcaccagatacctgactcgtaatctgtaa

SEQ ID NO: 283 - protein, 735 aa, Adeno-associated virus
MAADGYLPDWLKDTLSEGIRQWWKLKPGPPPPKPAERHKDDSGGLVLPGYKYLGPFNGLDKGEPVNEADAAALEYDKAYDRQLDSGDNPYLKYNHADAEFQERLKEDTSFGGNLGRAVFQAKKRVLEPLGLVEEPVKTAPGKKRPVEHSPVEPDSSSGTGKAGQQPARKRLNFGQTGDADSVPDPQPLGQPPAAPSGLGTNTMATGSGAPMADNNEGADGVGNSSGSWHCDSTWMGDRVITTSTRTWALPTYNNHLYKQISSQSGASNDNHYFGYSTPWGYFDFNRFHCHFSPRDWQRLINNNWGFRPKRLNFKLFNIQVKEVTQNDGTTTIANNLTSTVQVFTDSEYQLPYVPGSAHQGCLPPFPADVFMVPQYGYLTLNNGSQAVGRSSFYCLEYFPSQMLRTGNNFTFSYTFEDVPFHSSYAHSQSLDRLMNPLIDQYLYYLSRTNTPSGTTTQSRLQFSQAGASDIRDQSRNWLPGPCYRQQRVSKTAADNNNSEYSWTGATKYHLNGRDSLVNPGPAMASHKDDEEKFFPQSGVLIFGKQGSEKTNVDIEKVMITDEEEIRTTNPVATEQYGSVSTNLQSGNTQAATADVNTQGVLPGMVWQDRDVHLQGPIWAKIPHTDGHFHPSPLMGGFGLKHPPPQILIKNTPVPANPSTTFSAAKFASFITQYSTGQVSVEIEWELQKENSKRWNPEIQYTSNYNKSVNVDFTVDTNGVYSEPRPIGTRYLTRNL

SEQ ID NO: 284 - DNA, 2208 bp, Adeno-associated virus
atggctgccgatggttatcttccagattggctcgaggacactctctctgaaggaataagacagtggtggaagctcaaacctggcccaccaccaccaaagcccgcagagcggcataaggacgacagcaggggtcttgtgcttcctgggtacaagtacctcggacccttcaacggactcgacaagggggagccggtcaacgaggcagacgccgcggccctcgagcacgacaaggcctacgaccggcagctcgacagcggagacaacccgtacctcaagtacaaccacgccgacgcagagtttcaggagcgccttaaagaagatacgtcttttgggggcaacctcggacgagcagtcttccaggcgaaaaagagggttcttgaacctctgggcctggttgaggaacctgttaagacggctccgggaaaaaagaggccggtagagcactctcctgtggagccagactcctcctcgggaaccggaaaagcgggccagcagcctgcaagaaaaagattaaattttggtcagactggagacgcagactccgtacctgacccccagcctctcggacagccaccagcagccccctctggtctgggatctactacaatggctacaggcagtggcgcaccaatggcagacaataacgagggtgccgatggagtgggtaattcctcaggaaattggcattgcgattcccaatggctgggcgacagagtcatcaccaccagcacccgaacctgggccctgcccacatacaacaaccacctctacaagcaaatctccagccaatcaggagccagcaacgacaaccactactttggctacagcaccccctgggggtattttgacttcaacagattccactgccacttttcaccacgtgactggcaaagactcatcaacaacaactggggattccggcccaaaagactcaacttcaagctctttaatattcaagtcaaagaggtcacgcagaatgacggtacgacgacgattgccaataaccttaccagcacggttcaggtgtttactgactcggagtaccagctcccgtacgtcctgggctcggcgcatcaaggatgcctcccgccgtttccagcggacgtcttcatggtcccacagtatggatacctcaccctgaacaacgggagtcaggcggtaggacgctcttccttttactgcctggagtactttccttctcagatgctgcgtactggaaacaactttcagttcagctacacttttgaagacgtgcctttccacagcagctacgctcacagccagagtctggatcggctgatgaatcctctgatcgaccagtacctgtattatctgaacaagacacaaacaaatagtggaactcttcagcagtctcggctactgtttagccaagctggaccaaccaacatgtctcttcaagctaaaaactggctgcctggaccttgctacagacagcagcgtctgtcaaaacaggcaaacgacaacaacaacagcaactttccctggactgcagctacaaagtatcatctaaatggccgggactcgttggttaatccaggaccagctatggccagtcgcaaggatgacgaagaaaagtttttccccatgcatggaaccctgatatttggtaaacaaggaacaaatgccaacgacgcggatttggaaaatgtcatgattacagatgaagaagaaatcagggccaccaatcccgtggctacggagcagtacgggactgtgtcaaataatttgcaaaactcaaacactggtccaactactggaactgtcaatcaccaaggagcgttacctggtatggtgtggcaggatcgagacgtgtacctgcagggacccatttgggccaagattcctcacaccgatggacactttcatccttctccactgatgggaggttttggactcaaacacccgcctcctcagatcatgatcaaaaacactcccgttccagccaatcctcccacaaacttcagttctgccaagtttgcttctttcatcacacagtattccacgggacaggtcagcgtggagatcgagtgggagctgcagaaggagaacagcaaacgctggaatcccgaaattcagtacacttccaactacaacaagtctgttaatgtggactttactgtggacactaatggtgtgtattcagagcctcgccccattggcaccagatacctgactcgtaatctgtaa

SEQ ID NO: 285 - protein, 735 aa, Adeno-associated virus
MAADGYLPDWLEDTLSEGIRQWWKLKPGPPPPKPAERHKDDSRGLVLPGYKYLGPFNGLDKGEPVNEADAAALEHDKAYDRQLDSGDNPYLKYNHADAEFQERLKEDTSFGGNLGRAVFQAKKRVLEPLGLVEEPVKTAPGKKRPVEHSPVEPDSSSGTGKAGQQPARKRLNFGQTGDADSVPDPQPLGQPPAAPSGLGSTTMATGSGAPMADNNEGADGVGNSSGNWHCDSQWLGDRVITTSTRTWALPTYNNHLYKQISSQSGASNDNHYFGYSTPWGYFDFNRFHCHFSPRDWQRLINNNWGFRPKRLNFKLFNIQVKEVTQNDGTTTIANNLTSTVQVFTDSEYQLPYVLGSAHQGCLPPFPADVFMVPQYGYLTLNNGSQAVGRSSFYCLEYFPSQMLRTGNNFQFSYTFEDVPFHSSYAHSQSLDRLMNPLIDQYLYYLNKTQTNSGTLQQSRLLFSQAGPTNMSLQAKNWLPGPCYRQQRLSKQANDNNNSNFPWTAATKYHLNGRDSLVNPGPAMASRKDDEEKFFPMHGTLIFGKQGTNANDADLENVMITDEEEIRATNPVATEQYGTVSNNLQNSNTGPTTGTVNHQGALPGMVWQDRDVYLQGPIWAKIPHTDGHFHPSPLMGGFGLKHPPPQIMIKNTPVPANPPTNFSSAKFASFITQYSTGQVSVEIEWELQKENSKRWNPEIQYTSNYNKSVNVDFTVDTNGVYSEPRPIGTRYLTRNL

SEQ ID NO: 286 - DNA, 2208 bp, Adeno-associated virus
atggctgccgatggttatcttccagattggctcgaggacactctctctgaaggaataagacagtggtggaagctcaaacctggcccaccaccaccaaagcccgcagagcggcataaggacgacagcaggggtcttgtgcttcctgggtacaagtacctcggacccttcaacggactcgacaagggagagccggtcaacgaggcagacgccgcggccctcgagcacgacaaagcctacgaccggcagctcgacagcggagacaacccgtacctcaagtacaaccacgccgacgcggagtttcaggagcgccttaaagaagatacgtcttttgggggcaacctcggacgagcagtcttccaggcgaaaaagagggttcttgaacctctgggcctggttggggaacctgtcaagacggctccaggaaaaaagaggccggtagagcactctcctgtggagccagactcctcctcgggaaccggaaaggcgggccagcagcctgcaagaaaaagattgaattttggtcagactggagacgcagactcagtacctgacccccagcctctcggacagccaccagcagccccctctggtctgggaactaatacgatggctacaggcagtggcgcaccaatggcagacaataacgagggcgccgacggagtgggtaattcctcgggaaattggcattgcgattccacatggatgggcgacagagtcatcaccaccagcacccgaacctgggccctgcccacctacaacaaccacctctacaaacaaatttccagccaatcaggagcctcgaacgacaatcactactttggctacagcaccccttgggggtattttgacttcaacagattccactgccacttttcaccacgtgactggcaaagactcatcaacaacaactggggattccgacccaagagactcaacttcaagctctttaacattcaagtcaaagaggtcacgcagaatgacggtacgacgacgattgccaataaccttaccagcacggttcaggtgtttactgactcggagtaccagctcccgtacgtcctcggctcggcgcatcaaggatgcctcccgccgttcccagcagacgtcttcatggtgccacagtatggatacctcaccctgaacaacgggagtcaggcagtaggacgctcttcattttactgcctggagtactttccttctcagatgctgcgtaccggaaacaactttaccttcagctacacttttgaggacgttcctttccacagcggctacgctcacagccagagtctggaccgtctcatgaatcctctcatcgaccagtacctgtattacttgagcacaacaaacactccaagtggaaccaccacgcagtcaaggcttcagttttctcaggccggagcgagtgacattcgggaccagtctaggaactggcttcctggaccctgttaccgccagcagcgagtatcaaagacatctgcggataacaacaacagtgaatactcgtggactggagctaccaagtaccacctcaatggcagagactctctggtgaatccgggcccggccatggcaagccacaaggacaatgaagaaaagttttttcctcagagcggggttctcatctttgggaagcaaggctcagagaaaacaaatgtggacattgaaaaggtcatgattacagacgaagaggaaatcaggacaaccaatcccgtggctacggagcagtacggttctgtatctaccaacctccagagaggcaacagacaagcagctaccgcagatgtcaacacacaaggcgttcttccaggcatggtctggcaggacagagatgtgtaccttcaggggcccatctgggcaaagattccacacacggacggacattttcacccctctcccctcatgggtggattcggacttaaacaccctcctccacagattctcatcaagaacaccccggtacctgcgaatccttcgaccaccttcagtgcggcaaagtttgcttccttcatcacacagtactccacgggacaggtcagcgtggagatcgagtgggagctgcagaaggaaaacagcaaacgctggaatcccgaaattcagtacacttccaactacaacaagtctgttaatgtggactttactgtggacactaatggcgtgtattcagagcctcgccccattggcaccagatacctgactcgtaatctgtaa

SEQ ID NO: 287 - protein, 735 aa, Adeno-associated virus
MAADGYLPDWLEDTLSEGIRQWWKLKPGPPPPKPAERHKDDSRGLVLPGYKYLGPFNGLDKGEPVNEADAAALEHDKAYDRQLDSGDNPYLKYNHADAEFQERLKEDTSFGGNLGRAVFQAKKRVLEPLGLVGEPVKTAPGKKRPVEHSPVEPDSSSGTGKAGQQPARKRLNFGQTGDADSVPDPQPLGQPPAAPSGLGTNTMATGSGAPMADNNEGADGVGNSSGNWHCDSTWMGDRVITTSTRTWALPTYNNHLYKQISSQSGASNDNHYFGYSTPWGYFDFNRFHCHFSPRDWQRLINNNWGFRPKRLNFKLFNIQVKEVTQNDGTTTIANNLTSTVQVFTDSEYQLPYVLGSAHQGCLPPFPADVFMVPQYGYLTLNNGSQAVGRSSFYCLEYFPSQMLRTGNNFTFSYTFEDVPFHSGYAHSQSLDRLMNPLIDQYLYYLSTTNTPSGTTTQSRLQFSQAGASDIRDQSRNWLPGPCYRQQRVSKTSADNNNSEYSWTGATKYHLNGRDSLVNPGPAMASHKDNEEKFFPQSGVLIFGKQGSEKTNVDIEKVMITDEEEIRTTNPVATEQYGSVSTNLQRGNRQAATADVNTQGVLPGMVWQDRDVYLQGPIWAKIPHTDGHFHPSPLMGGFGLKHPPPQILIKNTPVPANPSTTFSAAKFASFITQYSTGQVSVEIEWELQKENSKRWNPEIQYTSNYNKSVNVDFTVDTNGVYSEPRPIGTRYLTRNL

SEQ ID NO: 288 - DNA, 2208 bp, Adeno-associated virus
atggctgccgatggttatcttccagattggctcgaggacactctctctgaaggaataagacagtggtggaagctcaaacctggcccaccaccaccaaagcccgcagagcggcataaggacgacagcaggggtcttgtgcttcctgggtacaagtacctcggacccttcaacggactcgacaagggagagccggtcaacgaggcagacgccgcggccctcgagcacgacaaagcctacgaccggcagctcgacagcggagacaacccgtacctcaagtacaaccacgccgacgcggagtttcaggagcgccttaaagaagatacgtcttttgggggcaacctcggacgagcagtcttccaggcgaaaaagagggttcttgaacctctgggcctggttggggaacctgttaagacggctccgggaaaaaagaggccggtagagcactctcctgtggagccagactcctcctcgggaaccggaaaggcgggccagcagcctgcaagaaaaagattgaattttggtcagactggagacgcagactcagtacctgacccccagcctctcggacagccaccagcagccccctctggtctgggaactaatacgatggctacaggcagtggcgcaccaatggcagacaataacgagggcgccgacggagtgggtaattcctcgggaaatcggcattgcgattccacatggatgggcgacagagtcatcaccaccagcacccgaacctgggccctgcccacctacaacaaccacctctacagacaaatttccagccaatcaggagcctcgaacgacaatcactactttggctacagcaccccttgggggtattttgacttcaacagattccactgccacttttcaccacgtgactggcaaagactcatcaacaacaactggggattccgacccaagagactcaacttcaagctctttaacattcaagtcaaagaggtcacgcagaatgacggtacgacgacgattgccaataaccttaccagcacggttcaggtgtttactgactcggagtaccagctcccgtacgtcctcggctcggcgcatcaaggatgcctcccgccgttcccagcagacgtcttcatggtgccacagtatggatacctcaccctgagcaacgggagtcaggcagtaggacgctcttcattttactgcccggagtactttccttctcagatgctgcgtaccggaaacaactttaccttcagctacacttttgaggacgttcctttccacagcagctacgctcacagccagagtctggaccgtctcatgaatcctctcatcgaccagtacctgtattacttgagcacaacaaacactccaagtggaaccaccacgcagtcaaggcttcagttttctcaggccggagcgagtgacattcgggaccagtctaggaactggcttcctggaccctgttaccgccagcagcgagtatcaaagacatctgcggataacaacaacagtgaatactcgtggactggagctaccaagtaccacctcaatggcagagactctctggtgaatccgggcccggccatggcaagccacaaggacaatgaagaaaagttttttcctcagagcggggttctcatctttgggaagcaaggctcagagaaaacaaatgtggacattgaaaaggtcatgattacagacgaagaggaaatcaggacaaccaatcccgtggctacggagcagtatggttctgtatctaccaacctccagagaggcaacagacaagcagctaccgcagatgtcaacacacaaggcgttcttccaggcatggtctggcaggacagagatgtgtaccttcaggggcccatctgggcaaagattccacacacggacggacattttcacccctctcccctcatgggtggattcggacctaaacaccctcctccacagattctcatcaagaacaccccggtacctgcgaatccttcgaccaccttcagtgcggcaaagtttgcttccttcatcacacagtactccacgggacaggtcagcgtggagatcgagtgggagctgcagaaggaaaacagcaaacgctggaatcccgaaattcagtacacttccaactacaacaagtctgttaatgtggactttactgtggacactaatggcgtgtattcagagcctcgccccattggcaccagatacctgactcgtaatttgtaa

SEQ ID NO: 289 - protein, 735 aa, Adeno-associated virus
MAADGYLPDWLEDTLSEGIRQWWKLKPGPPPPKPAERHKDDSRGLVLPGYKYLGPFNGLDKGEPVNEADAAALEHDKAYDRQLDSGDNPYLKYNHADAEFQERLKEDTSFGGNLGRAVFQAKKRVLEPLGLVGEPVKTAPGKKRPVEHSPVEPDSSSGTGKAGQQPARKRLNFGQTGDADSVPDPQPLGQPPAAPSGLGTNTMATGSGAPMADNNEGADGVGNSSGNRHCDSTWMGDRVITTSTRTWALPTYNNHLYRQISSQSGASNDNHYFGYSTPWGYFDFNRFHCHFSPRDWQRLINNNWGFRPKRLNFKLFNIQVKEVTQNDGTTTIANNLTSTVQVFTDSEYQLPYVLGSAHQGCLPPFPADVFMVPQYGYLTLSNGSQAVGRSSFYCPEYFPSQMLRTGNNFTFSYTFEDVPFHSSYAHSQSLDRLMNPLIDQYLYYLSTTNTPSGTTTQSRLQFSQAGASDIRDQSRNWLPGPCYRQQRVSKTSADNNNSEYSWTGATKYHLNGRDSLVNPGPAMASHKDNEEKFFPQSGVLIFGKQGSEKTNVDIEKVMITDEEEIRTTNPVATEQYGSVSTNLQRGNRQAATADVNTQGVLPGMVWQDRDVYLQGPIWAKIPHTDGHFHPSPLMGGFGPKHPPPQILIKNTPVPANPSTTFSAAKFASFITQYSTGQVSVEIEWELQKENSKRWNPEIQYTSNYNKSVNVDFTVDTNGVYSEPRPIGTRYLTRNL

SEQ ID NO: 290 - DNA, 2205 bp, Adeno-associated virus
atggctgccgatggttatcttccagattggctcgaggacactctctctgaaggaataagacagtggtggaagctcaaacctggcccaccaccaccaaagcccgcagagcggcataaggacgacagcaggggtcttgtgcttcctgggtacaagtacctcggacccttcaacggactcgacaagggagagccggtcaacgaggcagacgccgcggccctcgagcacgacaaggcctacgaccggcagctcgacagcggagacaacccgtacctcaagtacaaccacgccgacgcggagtttcaggagcgtcttaaagaagatacgtcttttgggggcaacctcggacgagcagtcttccaggcgaaaaagagggttcttgaacctctgggcctggttgaggaacctgttaagacggctccgggaaaaaagaggccggtagagcactctcctgcggagccagactcctcctcgggaaccggaaaagcgggccagcagcctgcaagaaaaagactgaatttcggtcagactggagacgcagactccgtacctgacccccagcctctcagacagccaccagcagcccccacaagtttgggatctactacaatggctacaggcagtggcgcaccaatggcagacaataacgagggtgccgatggagtgggtaattcctcaggaaattggcattgcgattcccaatggctgggcgacagagtcatcaccaccagcacccgaacctgggccctgcccacctacaacaaccacctttacaagcaaatctccagccaatcaggagcctcaaacgacaaccactactttggctacagcaccccctgggggtattttgacttcaacagattccactgccacttttcaccacgtgactggcaaagactcatcaacaacaactggggattccgacccaagagactcaacttcaagctctttaacattcaagtcaaagaggtcacgcagaatgacggtacgacgacgattgccaataaccttaccagcacggttcaggtgtttactgactcggagtaccagctcccgtacgtcctcggctcggcgcatcaaggatgcctcccgccgtttccagcggacgtcttcatggtcccacagtatggatacctcaccctgaacaacgggagtcaggcggtaggacgctcttccttttactgcctggagtactttccttctcagatgctgcgtactggaaacaactttcagttcagctacacttttgaagacgtgcctttccacagcagctacgctcacagccagagtttggatcggctgatgaatcctctgatcgaccagtacctgtattatctaaacagaacacaaacagctagtggaactcagcagtctcggctactgtttagccaagctggacccacaagcatgtctcttcaagctaaaaactggctgcctggaccgtgttatcgccagcagcgtttgtcaaagcaggcaaacgacaacaacaacagcaactttccctggactggagctaccaagtactacctcaatggcagagactctttggtgaacccgggcccggccatggccagccacaaggacgatgaagaaaagtttttccccatgcatggaaccctaatatttggtaaagaaggaacaaatgctaccaacgcggaattggaaaatgtcatgattacagatgaagaggaaatcaggaccaccaatcccgtggctacagagcagtacggatatgtgtcaaataatttgcaaaactcaaatactgctgcaagtactgaaactgtgaatcaccaaggagcattacctggtatggtgtggcaggatcgagacgtgtacctgcagggacccatttgggccaagattcctcacaccgatggacactttcatccttctccactgatgggaggttttggactcaaacacccgcctcctcagattatgatcaaaaacactcccgttccagccaatcctcccacaaacttcagttctgccaagtttgcttccttcatcacacagtattccacgggacaggtcagcgtggagatcgagtgggagctgcagaaggagaacagcaaacgctggaatcccgaaattcagtacacttccaactacaacaaatctgttaatgtggactttactgtggacactaatggtgtgtattcagagcctcgccccattggcaccagatacctgactcgtaatctgtaa

SEQ ID NO: 291 - protein, 734 aa, Adeno-associated virus
MAADGYLPDWLEDTLSEGIRQWWKLKPGPPPPKPAERHKDDSRGLVLPGYKYLGPFNGLDKGEPVNEADAAALEHDKAYDRQLDSGDNPYLKYNHADAEFQERLKEDTSFGGNLGRAVFQAKKRVLEPLGLVEEPVKTAPGKKRPVEHSPAEPDSSSGTGKAGQQPARKRLNFGQTGDADSVPDPQPLRQPPAAPTSLGSTTMATGSGAPMADNNEGADGVGNSSGNWHCDSQWLGDRVITTSTRTWALPTYNNHLYKQISSQSGASNDNHYFGYSTPWGYFDFNRFHCHFSPRDWQRLINNNWGFRPKRLNFKLFNIQVKEVTQNDGTTTIANNLTSTVQVFTDSEYQLPYVLGSAHQGCLPPFPADVFMVPQYGYLTLNNGSQAVGRSSFYCLEYFPSQMLRTGNNFQFSYTFEDVPFHSSYAHSQSLDRLMNPLIDQYLYYLNRTQTASGTQQSRLLFSQAGPTSMSLQAKNWLPGPCYRQQRLSKQANDNNNSNFPWTGATKYYLNGRDSLVNPGPAMASHKDDEEKFFPMHGTLIFGKEGTNATNAELENVMITDEEEIRTTNPVATEQYGYVSNNLQNSNTAASTETVNHQGALPGMVWQDRDVYLQGPIWAKIPHTDGHFHPSPLMGGFGLKHPPPQIMIKNTPVPANPPTNFSSAKFASFITQYSTGQVSVEIEWELQKENSKRWNPEIQYTSNYNKSVNVDFTVDTNGVYSEPRPIGTRYLTRNL

SEQ ID NO: 292 - DNA, 3160 bp, Adeno-associated virus
acccttcactaaagggactagtcctgcaggtttaaacgaattcgcccttgctgcgtcaactggaccaatgagaactttcccttcaacgactgtgtcgacaagatggtgatttggtgggaggaggggaagatgaccgccaaggtcgtggagtcggccaaagccattctcggaggaagcaaggtgcgcgtggaccagaaatgcaagtcctcggcccagatagatccgactcccgtgatcgtcacctccaacaccaacatgtgcgccgtgattgacgggaactcaacgaccttcgaacaccagcagccgttgcaagaccggatgttcaaatttgaactcacccgccgtctggatcatgactttgggaaggtcaccaagcgggaagtcaaagactttttccggtgggcaaaggatcacgtggttgaggtggagcatgaattctacgtcaaaaagggtggagccaagaaaagacccgcccctagtgacgcagatataagtgagcccaaacgggtgcgcgagtcagttgcgcagccatcgacgtcagacgcggaagcttcgatcaactacgcggacaggtaccaaaacaaatgttctcgtcacgtgggcatgaatctgatgctgtttccctgcagacaatgcgagagaatgaatcaaaattcaaatatctgcttcactcacggacagaaagactgtttagagtgctttcccgtgtcagaatctcaacctgtttctgtcgtcaaaaaggcgtatcagaaactgtgctacattcatcatatcatgggaaaggtgccagacgcttgcactgcctgcgatctggtcaatgtggatttggatgactgcatctctgaacaataaatgatttaaatcaggtatggctgccgatggttatcttccagattggctcgaggacactctctctgaaggaataagacagtggtggaagctcaaacctggcccaccaccaccaaagcccgcagagcggcataaggacgacagcaggggtcttgtgcttcctgggtacaagtacctcggacccttcaacggactcgacaagggagagccggtcaacgaggcagacgccgcggccctcgagcacgacaaggcctacgaccggcagctcgacagcggagacaacccgtacctcaagtacaaccacgccgacgcggagtttcaggagcgtcttaaagaagatacgtcttttgggggcaacctcggacgagcagtcttccaggcgaaaaagagggttcttgaacctctgggcctggttgaggaacctgttaagacggctccgggaaaaaagaggccggtagagcactctcctgcggagccagactcctcctcgggaaccggaaaagcgggccagcagcctgcaagaaaaagactgaatttcggtcagactggagacgcagactccgtacctgacccccagcctctcagacagccaccagcagcccccacaagtttgggatctactacaatggctacaggcagtggcgcaccaatggcagacaataacgagggtgccgatggagtgggtaattcctcaggaaattggcattgcgattcccaatggctgggcgacagagtcatcaccaccagcacccgaacctgggccctgcccacctacaacaaccacctttacaagcaaatctccagccaatcaggagcctcaaacgacaaccactactttggctacagcaccccctgggggtattttgacttcaacagattccactgccacttttcaccacgtgactggcaaagactcatcaacaacaactggggattccgacccaagagactcaacttcaagctctttaacattcaagtcaaagaggtcacgcagaatgacggtacgacgacgattgccaataaccttaccagcacggttcaggtgtttactgactcggagtaccagctcccgtacgtcctcggctcggcgcatcaaggatgcctcccgccgtttccagcggacgtcttcatggtcccacagtatggatacctcaccctgaacaacgggagtcaggcggtaggacgctcttccttttactgcctggagtactttccttctcagatgctgcgtactggaaacaactttcagttcagctacacttttgaagacgtgcctttccacagcagctacgctcacagccagagtttggatcggctgatgaatcctctgatcgaccagtacctgtattatctaaacagaacacaaacagctagtggaactcagcagtctcggctactgtttagccaagctggacccacaagcatgtctcttcaagctaaaaactggctgcctggaccgtgttatcgccagcagcgtttgtcaaagcaggcaaacgacaacaacaacagcaactttccctggactggagctaccaagtactacctcaatggcagagactctttggtgaacccgggcccggccatggccagccacaaggacgatgaagaaaagtttttccccatgcatggaaccctaatatttggtaaagaaggaacaaatgctaccaacgcggaattggaaaatgtcatgattacagatgaagaggaaatcaggaccaccaatcccgtggctacagagcagtacggatatgtgtcaaataatttgcaaaactcaaatactgctgcaagtactgaaactgtgaatcaccaaggagcattacctggtatggtgtggcaggatcgagacgtgtacctgcagggacccatttgggccaagattcctcacaccgatggacactttcatccttctccactgatgggaggttttggactcaaacacccgcctcctcagattatgatcaaaaacactcccgttccagccaatcctcccacaaacttcagttctgccaagtttgcttccttcatcacacagtattccacgggacaggtcagcgtggagatcgagtgggagctgcagaaggagaacagcaaacgctggaatcccgaaattcagtacacttccaactacaacaaatctgttaatgtggactttactgtggacactaatggtgtgtattcagagcctcgccccattggcaccagatacctgactcgtaatctgtaattgcttgttaatcaataaaccgtttaattcgtttcagttgaactttggtctctgcgaagggcgaattcgcggccgctaaatcaatcg

SEQ ID NO: 293 - protein, 734 aa, Adeno-associated virus
MAADGYLPDWLEDTLSEGIRQWWKLKPGPPPPKPAERHKDDSRGLVLPGYKYLGPFNGLDKGEPVNEADAAALEHDKAYDRQLDSGDNPYLKYNHADAEFQERLKEDTSFGGNLGRAVFQAKKRVLEPLGLVEEPVKTAPGKKRPVEHSPAEPDSSSGTGKAGQQPARKRLNFGQTGDADSVPDPQPLGQPPAAPTSLGSTTMATGSGAPMADNNEGADGVGNSSGNWHCDSQWLGDRVITTSTRTWALPTYNNHLYKQISSQSGASNDNHYFGYSTPWGYFDFNRFHCRFSPRDWQRLINNNWGFRPKRLNFKLFNIQVKEVTQNDGTTTIANNLTSTVQVFTDSEYQLPYVLGSAHQGCLPPFPADVFMVPQYGYLTLNNGSQAVGRSSFYCLEYFPSQMLRTGNNFQFSYTFEDVPFHSSYAHSQGLDRLMNPLIDQYLYYLNRTQTASGTQQSRLLFSQAGPTSMSLQAKNWLPGPCYRQQRLSKQANDNNNSNFPWTGATKYHLNGGDSLVNPGPAMASHKDDEEKFFPMHGTLIFGKEGTNATNAELENVMITDEEEIRTTNPVATEQYGYVSNNLQNSNTAASTETVNHQGALPGMVWQDRDVYLRGPIWAKIPHADGHFHPSPLMGGFGLKHPPPQIMIKNTPVPANPPTNFSSAKFASFITQYSTGQVSVEIEWELQKENSKRWNPEIQYTSNYNKSVNVDFTVDTNGVYSEPRPIGTRYLTRNL

SEQ ID NO: 294 - DNA, 3157 bp, Adeno-associated virus
ctcactaagggactagtcctgcaggtttaaacgaattcgcccttgctgcgtcaactggaccaatgagaactttcccttcaacgactgtgtcgacaagatggtgatttggtgggaggaggggaagatgaccgccaaggtcgtggagtcggccaaagccactctcggaggaagcaaggtgcgcgtggaccagaaacgcaagtcctcggcccagatagatccgactcccgtgatcgtcacctccaacaccaacatgtgcgccgtgattgacgggaactcaacgaccttcgaacaccagcagccgttgcaagaccgaatgttcaaatttgaactcacccgccgtctggatcatgacttcgggaaggtcaccaagcaggaagtcaaagactttttccggtgggcaaaggatcacgtggttgaggtggagcatgaattctacgtcaaaaagggtggagccaagaaaagacccgcccctagtgacgcagatataagtgagcccaaacgggtgcgcgagtcagttgcgcagccatcgacgtcagacgcggaagcttcgatcaactacgcggacaggtaccaaaacaaatgttctcgtcacgtgggcatgaatctgatgctgtttccctgcagacaatgcgagagaatgaatcaaaattcaaatatctgcttcactcacggacagaaagactgtttagagtgctttcccgtgtcagaatctcaacctgtttctgtcgtcaaaaaggcgtatcagaaactgtgctacattcatcatatcatgggaaaggtgccagacgcttgcactgcctgcgatctggtcaatgtggatttggatgactgcatctctgaacaataaatgatttaaatcaggtatggctgccgatggttatcttccagattggctcgaggacactctctctgaaggaataagacagtggtggaagctcaaacctggcccaccaccaccaaagcccgcagagcggcataaggacgacagcaggggtcttgtgcttcctgggtacaagtacctcggacccttcaacggactcgacaagggagagccggtcaacgaggcagacgccgcggctctcgagcacgacaaggcctacgaccggcagctcgacagcggagacaacccgtacctcaagtacaaccacgccgacgcggagtttcaggagcgtcttaaagaagatacgtcttttgggggcaacctcggacgagcagtcttccaggcgaaaaagagggttcttgaacctctgggcctggttgaggaacctgttaagacggctccgggaaaaaagaggccggtagagcactctcctgcggagccagactcctcctcgggaaccggaaaagcgggccagcagcctgcaagaaaaagactgaatttcggtcagactggagacgcagactccgtacctgacccccagcctctcggacagccaccagcagcccccacaagtttgggatctactacaatggctacaggcagtggcgcaccaatggcagacaataacgagggtgccgatggagtgggtaattcctcaggaaattggcattgcgattcccaatggctgggcgacagagtcatcaccaccagcacccgaacctgggccctgcccacctacaacaaccacctttacaagcaaatctccagccaatcaggagcctcaaacgacaaccactactttggctacagcaccccctgggggtattttgacttcaacagattccactgccgcttttcaccacgtgactggcaaagactcatcaacaacaactggggattccgacccaagagactcaacttcaagctctttaacattcaagtcaaagaggtcacgcagaatgacggtacgacgacgattgccaataaccttaccagcacggttcaggtgtttactgactcggagtaccagctcccgtacgtcctcggctcggcgcatcaaggatgcctcccgccgtttccagcggacgtcttcatggtcccacagtatggatacctcaccctgaacaacgggagtcaggcggtaggacgctcttccttttactgcctggagtactttccttctcagatgctgcgtactggaaacaactttcagttcagctacacttttgaagacgtgcctttccacagcagctacgctcacagccagggtttggatcggctgatgaatcctctgatcgaccagtacctgtattatctaaacagaacacaaacagctagtggaactcagcagtctcggctactgtttagccaagctggacccacaagcatgtctcttcaagctaaaaactggctgcctggaccgtgttatcgccagcagcgtttgtcaaagcaggcaaacgacaacaacaacagcaactttccctggactggagctaccaagtaccacctcaatggcggagactctttggtgaacccgggcccggccatggccagccacaaggacgatgaagaaaagtttttccccatgcatggaaccctaatatttggtaaagaaggaacaaatgctaccaacgcggaattggaaaatgtcatgattacagatgaagaggaaatcaggaccaccaatcccgtggctacagagcagtacggatatgtgtcaaataatttgcaaaactcaaatactgctgcaagtactgaaactgtgaatcaccaaggagcattacctggtatggtgtggcaggatcgagacgtgtacctgcggggacccatttgggccaagattcctcacgccgatggacactttcatccttctccactgatgggaggttttggactcaaacacccgcctcctcagattatgatcaaaaacactcccgttccagccaatcctcccacaaacttcagttctgccaagtttgcttccttcatcacacagtattccacgggacaggtcagcgtggagatcgagtgggagctgcagaaggagaacagcaaacgctggaatcccgaaattcagtacacttccaactacaacaaatctgttaatgtggactttactgtggacactaatggtgtgtattcagagcctcgccccattggcaccagatacctgactcgtaatctgtaattgcttgttaatcaataaaccgtttaattcgtttcagttgaactttggtctctgcgaagggcgaattcgcggccgctaaattcaattcg

SEQ ID NO: 295 - protein, 734 aa, Adeno-associated virus
MAADGYLPDWLEDTLSEGIRQWWKLKPGPPPPKPAERHKDDSRGLVLPGYKYLGPFNGLDKGEPVNEADAAALEHDKAYDRQLDSGDNPYLKYNHADAEFQERLKEDTSFGGNLGRAVFQAKKRVLEPLGLVEEPVKTAPGKKRPVEHSPAEPDSSSGTGKAGQQPARKRLNFGQTGDADSVPDPQPLGQPPAAPTSLGSTTMATGSGAPMADNNEGADGVGNSSGNWHCDSQWLGDRVITTSTRTWALPTYNNHLYKQISSQSGASNDNHYFGYSTPWGYFDFNRFHCHFSPRDWQRLINNNWGFRPKRLNFKLFNIQVKEVTQNDGTTTIANNLTSTVQVFTDSEYQLPYVLGSAHQGCLPPFPADVFMVPQYGYLTLNNGSQAVGRSSFYCLECFPSQMLRTGNNFQFSYTFEDVPFHSSYAHSQSLDRLMNPLIDQYLYYLNRTQTASGTQQSRLLFSQAGPTSMSLQAKNWLPGPCYRQQRLSKQANDNNNSNFPWTGATKYHLNGRDSLVNPGPAMASHKDDEEKFFPMHGTLIFGKEGTNATNAELENVMITDEEEIRTTNPVATEQYGYVSNNLQNSNTAASTETVNHQGALPGMVWQDRDVYLQGPIWAKIPHTDGHFHPSPLMGGFGLKHPPPQIMIKNTPVPANPPTNFSSAKFASFITQYSTGQVSVEIEWELQKENSKRWNPEIQYTSNYNKSVNVDFTVDTNGVYSEPRPIGTRYLTRNL

SEQ ID NO: 296 - DNA, 2208 bp, Adeno-associated virus
atggctgccgatggttatcttccagattggctcgaggacactctctctgaaggaataagacagtggtggaagctcaaacctggcccaccaccaccaaagcccgcagagcggcataaggacgacagcaggggtcttgtgcttcctggatacaagtacctcggacccttcaacggactcgacaagggagagccggtcaacgaggcagacgccgcggccctcgagcacgacaaggcctacgaccggcagctcgacagcggagacaacccgtacctcaagtacaaccacgccgacgcggagtttcaggagcgccttaaagaagatacgtcttttgggggcaacctcggacgagcagtcttccaggcgaaaaagagggttcttgaacctctgggcctggttgaggaacctgttaagacggctccgggaaaaaagaggccggtagagcactctcctgtggagccagactcctcctcgggaaccggaaaagcgggcaaccagcctgcaagaaaaagattgaatttcggtcagactggagacgcagactccgtacctgacccccagcctctcggacagccaccagcatccccctctggtctgggaactaatacgatggctacaggcagtggcgcaccaatggcagacaataacgagggcgccgacggagtgggtaattcctcgggaaattggcattgcgattccacatggatgggcgacagagtcgtcaccaccagcacccgcacctgggccctgcccacctacaacaaccacctctacaagcagatttccagccaatcaggagccagcaacgacaaccactactttggctacagcaccccttgggggtattttgacttcaacagattccactgccacttttcgccacgcgactggcagagactcatcaacaacaactggggattccggcccaaaagactcaacttcaagctgtttaacattcaagtcaaggaggtcacgcagaatgacggtacgacgacgattgccaataaccttaccagcacggttcaggtgtttactgacttggagtaccagctcccgtacgtcctcggctcggcgcatcaaggatgcctcccgccgttcccagcagacgtcttcatggtgccacagtatggatacctcaccctgaacaacgggagtcaggcggtaggacgctcttccttttactgcctggagtactttccttctcagatgcttcgcaccggaaacaactttaccttcagctacacttttgaagacgttcctttccacagcagctacgctcacagtcaaagtctggaccgtctcatgaatcctctcatcgaccagtacctgtattacttgagcagaacaaacactccaagcggaaccactacgcagtccaggcttcagttttctcaggccggagcgagtgacattcgggaccagtctaggaactggcttcctggaccctgttaccgccagcagcgagtatcaaagacagctgcggataacaacaacagtgaatactcgtggactggagctaccaagtaccacctcaatggcagagactctctggtgaatccgggcccggccatggccagccacaaggacgatgaagaaaagttttttcctcaaagcggggttctcatctttgggaagcaaggctcagagaaaacaaatgtggacattgaaaaggtcatgattacagacgaagaggaaatcaggaccaccaatcccgtggctacggagcagtatggttctgtatctaccaacctccagagcggcaacacacaagcagctacctcagatgtcaacacacaaggcgttcttccaggcatggtctggcaggacagagacgtgtacctgcaggggcccatctgggcaaaaattccacacacggacggacattttcacccctctcccctcatgggcggatttggacttaaacaccctcctccacagattctcattaagaataccccggtacctgcgaatccttcgaccaccttcagcgcggcaaagtttgcttccttcatcacacagtattccacggggcaggtcagcgtggagatcgagtgggagctgcagaaggagaacagcaaacgctggaatcccgaaattcagtacacttccaactacaacaaatctgttaatgtggactttactgtggacactaatggggtgtattcagagcctcgccctattggcaccagatacctgactcgtaatctgtaa

SEQ ID NO: 297 - DNA, 3159 bp, Adeno-associated virus
gattgatttagcggccgcgaattcgcccttgctgcgtcaactggaccaatgagaactttcccttcaacgattgcgtcgacaagatggtgatctggtgggaggagggaaagatgaccgccaaggtcgtggagtcggccaaagccattctcggaggaagcaaggtgcgtgtggaccaaaagtgcaagtcttcggcccagatcgacccgactcccgtgatcgtcacctccaacaccaacatgtgcgccgtgattgatggaaactcaacgaccttcgagcaccagcagccgttgcaagaccggatgttcaaatttgaacttacccgccgtctggatcatgactttggaaaggtcaccaagcaggaagtgaaagactttttccggtgggcaaaggatcacgtggttgaggtggagcatgagttctacgtcaaaaagggtggagccaaaaaaagacccgcccccagtgacgcagatataagtgagcccaaacgggcgcgcgagtcagttgcgcagccatcgacgtcagacgcggaagcttcgatcaactacgcggacaggtaccaaaacaaatgttctcgtcacgtgggcatgaatctgatgctgtttccctgcagacaatgcgagagaatgaatcagaattcaaatatctgcttcactcacggacagaaagactgtccatagtgctttcccgtgtcagaatctcaacccgtttctgtcgtcaaaaaggcgtatcagaaactgtgctacattcatcacatcatgggaaaggtgccagacgcttgcactgcttgcgacctggtcaatgtggatttggatgactgcatctctgaacaataaatgatttaaatcaggtatggctgccgatggttatcttccagattggctcgaggacactctctctgaaggaataagacagtggtggaagctcaaacctggcccaccaccaccaaagcccgcagagcggcataaggacgacagcaggggtcttgtgcttcctggatacaagtacctcggacccttcaacggactcgacaagggagagccggtcaacgaggcagacgccgcggccctcgagcacgacaaggcctacgaccggcagctcgacagcggagacaacccgtacctcaagtacaaccacgccgacgcggagtttcaggagcgccttaaagaagatacgtcttttgggggcaacctcggacgagcagtcttccaggcgaaaaagagggttcttgaacctctgggcctggttgaggaacctgttaagacggctccgggaaaaaagaggccggtagagcactctcctgtggagccagactcctcctcgggaaccggaaaagcgggcaaccagcctgcaagaaaaagattgaatttcggtcagactggagacgcagactccgtacctgacccccagcctctcggacagccaccagcatccccctctggtctgggaactaatacgatggctacaggcagtggcgcaccaatggcagacaataacgagggcgccgacggagtgggtaattcctcgggaaattggcattgcgattccacatggatgggcgacagagtcgtcaccaccagcacccgcacctgggccctgcccacctacaacaaccacctctacaagcagatttccagccaatcaggagccagcaacgacaaccactactttggctacagcaccccttgggggtattttgacttcaacagattccactgccacttttcgccacgcgactggcagagactcatcaacaacaactggggattccggcccaaaagactcaacttcaagctgtttaacattcaagtcaaggaggtcacgcagaatgacggtacgacgacgattgccaataaccttaccagcacggttcaggtgtttactgacttggagtaccagctcccgtacgtcctcggctcggcgcatcaaggatgcctcccgccgttcccagcagacgtcttcatggtgccacagtatggatacctcaccctgaacaacgggagtcaggcggtaggacgctcttccttttactgcctggagtactttccttctcagatgcttcgcaccggaaacaactttaccttcagctacacttttgaagacgttcctttccacagcagctacgctcacagtcaaagtctggaccgtctcatgaatcctctcatcgaccagtacctgtattacttgagcagaacaaacactccaagcggaaccactacgcagtccaggcttcagttttctcaggccggagcgagtgacattcgggaccagtctaggaactggcttcctggaccctgttaccgccagcagcgagtatcaaagacagctgcggataacaacaacagtgaatactcgtggactggagctaccaagtaccacctcaatggcagagactctctggtgaatccgggcccggccatggccagccacaaggacgatgaagaaaagttttttcctcaaagcggggttctcatctttgggaagcaaggctcagagaaaacaaatgtggacattgaaaaggtcatgattacagacgaagaggaaatcaggaccaccaatcccgtggctacggagcagtatggttctgtatctaccaacctccagagcggcaacacacaagcagctacctcagatgtcaacacacaaggcgttcttccaggcatggtctggcaggacagagacgtgtacctgcaggggcccatctgggcaaaaattccacacacggacggacattttcacccctctcccctcatgggcggatttggacttaaacaccctcctccacagattctcattaagaataccccggtacctgcgaatccttcgaccaccttcagcgcggcaaagtttgcttccttcatcacacagtattccacggggcaggtcagcgtggagatcgagtgggagctgcagaaggagaacagcaaacgctggaatcccgaaattcagtacacttccaactacaacaaatctgttaatgtggactttactgtggacactaatggggtgtattcagagcctcgccctattggcaccagatacctgactcgtaatctgtaattgcttgttaatcaataaaccgtttaattcgtttcagttgaactttggtctctgcgaagggcgaattcgtttaaacctgcaggactagtccctttagtgagg

SEQ ID NO: 298 - protein, 735 aa, Adeno-associated virus
MAADGYLPDWLEDTLSEGIRQWWKLKPGPPPPKPAERHKDDSRGLVLPGYKYLGPFNGLDKGEPVNEADAAALEHDKAYDRQLDSGDNPYLKYNHADAEFQERLKEDTSFGGNLGRAVFQAKKRVLEPLGLVEEPVKTAPGKKRPVEHSPVEPDSSSGTGKAGNQPARKRLNFGQTGDADSVPDPQPLGQPPASPSGLGTNTMATGSGAPMADNNEGADGVGNSSGNWHCDSTWMGDRVVTTSTRTWALPTYNNHLYKQISSQSGASNDNHYFGYSTPWGYFDFNRFHCHFSPRDWQRLINNNWGFRPKRLNFKLFNIQVKEVTQNDGTTTIANNLTSTVQVFTDLEYQLPYVLGSAHQGCLPPFPADVFMVPQYGYLTLNNGSQAVGRSSFYCLEYFPSQMLRTGNNFTFSYTFEDVPFHSSYAHSQSLDRLMNPLIDQYLYYLSRTNTPSGTTTQSRLQFSQAGASDIRDQSRNWLPGPCYRQQRVSKTAADNNNSEYSWTGATKYHLNGRDSLVNPGPAMASHKDDEEKFFPQSGVLIFGKQGSEKTNVDIEKVMITDEEEIRTTNPVATEQYGSVSTNLQSGNTQAATSDVNTQGVLPGMVWQDRDVYLQGPIWAKIPHTDGHFHPSPLMGGFGLKHPPPQILIKNTPVPANPSTTFSAAKFASFITQYSTGQVSVEIEWELQKENSKRWNPEIQYTSNYNKSVNVDFTVDTNGVYSEPRPIGTRYLTRNL

SEQ ID NO: 299 - DNA, 2205 bp, Adeno-associated virus
atggctgccgatggttatcttccagattggctcgaggacactctctctgaaggaataagacagtggtggaagctcaaacctggcccaccaccaaagcccgcagagcggcataaggacgacagcaggggtcttgtgcttcctggatacaagtacctcggacccttcaacggactcgacaagggagagccggtcaacgaggcagacgccgcggccctcgagcacgacaaggcctacgaccggcagctcgacagcggagacaacccgtacctcaagtacaaccacgccgacgcggagtttcaggagcgccttaaagaagatacgtcttttgggggcaacctcggacgagcagtcttccaggcgaaaaagagggttcttgaacctctgggcctggttgaggaacctgttaagacggctccgggaaaaaagaggcccgtagagcactctcctgtggagccagactcctcctcgggaaccggaaaagcgggcaaccagcctgcaagaaaaagattgaatttcggtcagactggagacgcagactccgtacctgacccccagcctctcggacagccaccagcagccccctctggtctgggaactaatacgatggctacaggcagtggcgcaccaatggcagacaataacgagggcgccgacggagtgggtaattcctcgggagattggcattgcgattccacatggatgggcgacagagtcatcaccaccagcacccgcacctgggccctgcccacctacaacaaccacctctacaagcagatttccagccaatcaggagccagcaatgacaaccactactttggctacagcaccccttgggggtattttgacttcaacagattccactgccacttttcgccacgcgactggcagagactcatcaacaacaactggggattccggcccaaaagactcaacctcaagctgtttaacattcaagtcaaggaggtcacgcagaatgacggtacgacgacgattgccaataaccttaccagcacggttcaggtgtttactgacttggagtaccagctcccgtacgtcctcggctcggcgcatcaaggatgcctcccgccgttcccagcagacgtcttcatggtgccacagtatggatacctcaccctgaacaacgggagtcaggcggtaggacgctcttccttttactgcctggagtactttccttctcagatgcttcgtaccggaaacaactttaccttcagctacacttttgaagacgttcctttccacagcagctacgctcacagtcaaagtctggaccgtctcatgaatcctctcatcgaccagtacctgtattacttgagcagaacaaacactccaagcggaaccactacgcagtccaggcttcagttttctcaggccggagcgagtgacattcgggaccagtctaggaactggcttcctggaccctgttaccgccagcagcgagtatcaaagacagctgcggataacaacaacggtgaatactcgtggactggagctaccaagtaccacctcaatggcagagactctctggtgaatccgggcccggccatggccagccacaaggacgatgaagaaaagttttttcctcaaagcggggttctcatctttgggaagcaaggctcagagaaaacaaatgtggacattgaaaaggtcatgattacagacgaagaggaaatcaggaccaccaatcccgtggctacggagcagtatggttctgtatctaccaacctccagagcggcaacacacgagcagctacctcagatgtcaacacacaaggcgttcttccaggcatggtctggcaggacagagacgtgtacctgcaggggcccatctgggcaaaaattccacacacggacggacattttcacccctctcccctcatgggcggatttggacttaaacaccctcctccacagattctcattaagaataccccggtacctgcgaatccttcgaccaccttcagcgcggcaaagtttgcttccttcatcacacagtattccacggggcaggtcagcgtggagatcgagtgggagctgcagaaggagaacagcaaacgctggaatcccgaaattcagtacacttccaactacaacaaatctgttaatgtggactttactgtggacactaatggggtgtattcagagcctcgccctattggcaccagatacctgactcgtaatctgtaa

SEQ ID NO: 300 - DNA, 3156 bp, Adeno-associated virus
cgattgaatttagcggccgcgaattcgcccttgctgcgtcaacggaccaatgagaactttcccttcaacgattgcgtcgacaagatggtgatctggtgggaggagggaaagatgaccgccaaggtcgtggagtcggccaaagccattctcggaggaagcaaggtgcgtgtggaccaaaagtgcaagtcttcggcccagatcgacccgactcccgtgatcgtcacctccaacaccaacatgtgcgccgtgattgatggaaactcaacgaccttcgagcaccagcagccgttgcaagaccggatgttcaaatttgaacttacccgccgtctggatcatgactttggaaaggtcaccaagcaggaagtgaaagactttttccggtgggcaaaggatcacgtggttgaggtggagcatgagttctacgtcaaaaagggtggagccaaaaaaagacccgcccccagtgacgcagatataagtgagcccaaacgggcgcgcgagtcagttgcgcagccatcgacgtcagacgcggaagcttcgatcaactacgcggacaggtaccaaaacaaatgttctcgtcacgtgggcatgaatctgatgctgtttccctgcagacaatgcgagcgaatgaatcagaattcaaatatctgcttcactcacggacagaaagactgtttagagtgctttcccgtgtcagaatctcaacccgtttctgtcgtcaaaaaggcgtatcagaaactgtgctacattcatcacatcatgggaaaggtgccagacgcttgcactgcttgcgacctggtcaatgtggatttggatgactgcatctctgaacaataaatgatttaaatcaggtatggctgccgatggttatcttccagattggctcgaggacactctctctgaaggaataagacagtggtggaagctcaaacctggcccaccaccaaagcccgcagagcggcataaggacgacagcaggggtcttgtgcttcctggatacaagtacctcggacccttcaacggactcgacaagggagagccggtcaacgaggcagacgccgcggccctcgagcacgacaaggcctacgaccggcagctcgacagcggagacaacccgtacctcaagtacaaccacgccgacgcggagtttcaggagcgccttaaagaagatacgtcttttgggggcaacctcggacgagcagtcttccaggcgaaaaagagggttcttgaacctctgggcctggttgaggaacctgttaagacggctccgggaaaaaagaggcccgtagagcactctcctgtggagccagactcctcctcgggaaccggaaaagcgggcaaccagcctgcaagaaaaagattgaatttcggtcagactggagacgcagactccgtacctgacccccagcctctcggacagccaccagcagccccctctggtctgggaactaatacgatggctacaggcagtggcgcaccaatggcagacaataacgagggcgccgacggagtgggtaattcctcgggagattggcattgcgattccacatggatgggcgacagagtcatcaccaccagcacccgcacctgggccctgcccacctacaacaaccacctctacaagcagatttccagccaatcaggagccagcaatgacaaccactactttggctacagcaccccttgggggtattttgacttcaacagattccactgccacttttcgccacgcgactggcagagactcatcaacaacaactggggattccggcccaaaagactcaacctcaagctgtttaacattcaagtcaaggaggtcacgcagaatgacggtacgacgacgattgccaataaccttaccagcacggttcaggtgtttactgacttggagtaccagctcccgtacgtcctcggctcggcgcatcaaggatgcctcccgccgttcccagcagacgtcttcatggtgccacagtatggatacctcaccctgaacaacgggagtcaggcggtaggacgctcttccttttactgcctggagtactttccttctcagatgcttcgtaccggaaacaactttaccttcagctacacttttgaagacgttcctttccacagcagctacgctcacagtcaaagtctggaccgtctcatgaatcctctcatcgaccagtacctgtattacttgagcagaacaaacactccaagcggaaccactacgcagtccaggcttcagttttctcaggccggagcgagtgacattcgggaccagtctaggaactggcttcctggaccctgttaccgccagcagcgagtatcaaagacagctgcggataacaacaacggtgaatactcgtggactggagctaccaagtaccacctcaatggcagagactctctggtgaatccgggcccggccatggccagccacaaggacgatgaagaaaagttttttcctcaaagcggggttctcatctttgggaagcaaggctcagagaaaacaaatgtggacattgaaaaggtcatgattacagacgaagaggaaatcaggaccaccaatcccgtggctacggagcagtatggttctgtatctaccaacctccagagcggcaacacacgagcagctacctcagatgtcaacacacaaggcgttcttccaggcatggtctggcaggacagagacgtgtacctgcaggggcccatctgggcaaaaattccacacacggacggacattttcacccctctcccctcatgggcggatttggacttaaacaccctcctccacagattctcattaagaataccccggtacctgcgaatccttcgaccaccttcagcgcggcaaagtttgcttccttcatcacacagtattccacggggcaggtcagcgtggagatcgagtgggagctgcagaaggagaacagcaaacgctggaatcccgaaattcagtacacttccaactacaacaaatctgttaatgtggactttactgtggacactaatggggtgtattcagagcctcgccctattggcaccagatacctgactcgtaatctgtaattgcttgttaatcaataaaccgtttaattcgtttcagttgaactttggtctctgcgaagggcgaattcgtttaaacctgcaggactagtccctttagtgag

SEQ ID NO: 301 - protein, 734 aa, Adeno-associated virus
MAADGYLPDWLEDTLSEGIRQWWKLKPGPPPKPAERHKDDSRGLVLPGYKYLGPFNGLDKGEPVNEADAAALEHDKAYDRQLDSGDNPYLKYNHADAEFQERLKEDTSFGGNLGRAVFQAKKRVLEPLGLVEEPVKTAPGKKRPVEHSPVEPDSSSGTGKAGNQPARKRLNFGQTGDADSVPDPQPLGQPPAAPSGLGTNTMATGSGAPMADNNEGADGVGNSSGDWHCDSTWMGDRVITTSTRTWALPTYNNHLYKQISSQSGASNDNHYFGYSTPWGYFDFNRFHCHFSPRDWQRLINNNWGFRPKRLNLKLFNIQVKEVTQNDGTTTIANNLTSTVQVFTDLEYQLPYVLGSAHQGCLPPFPADVFMVPQYGYLTLNNGSQAVGRSSFYCLEYFPSQMLRTGNNFTFSYTFEDVPFHSSYAHSQSLDRLMNPLIDQYLYYLSRTNTPSGTTTQSRLQFSQAGASDIRDQSRNWLPGPCYRQQRVSKTAADNNNGEYSWTGATKYHLNGRDSLVNPGPAMASHKDDEEKFFPQSGVLIFGKQGSEKTNVDIEKVMITDEEEIRTTNPVATEQYGSVSTNLQSGNTRAATSDVNTQGVLPGMVWQDRDVYLQGPIWAKIPHTDGHFHPSPLMGGFGLKHPPPQILIKNTPVPANPSTTFSAAKFASFITQYSTGQVSVEIEWELQKENSKRWNPEIQYTSNYNKSVNVDFTVDTNGVYSEPRPIGTRYLTRNL

SEQ ID NO: 302 - DNA, 2208 bp, Adeno-associated virus
atggctgccgatggttatcttccagattggctcgaggacactctctctgaaggaataagacagtggtggaagctcaaacctggcccaccaccaccaaagcccgcagagcggcataaggacgacagcaggggtcttgtgcttcctgggtacaagtacctcggacccttcaacggactcgacaagggagagccggtcaacgaggcagacgccgcggccctcgagcacgacaaggcctacgaccggcagctcgacagcggagacaacccgtacctcaagtacgaccacgccgacgcggagtttcaggagcgccttaaagaagatacgtcttttgggggcaacctcggacgagcagtcttccaggcaaaaaagagggttcttgaacctctgggcctggttgaggagcctgttaagacggctccgggaaaaaagaggccggtagagcactctcctgtggagccagactcctcctcgggaaccggaaaagcgggcaaccagcctgcaagaaagagattgaatttcggtcagactggagacgcagactccgtacctgacccccagcctctcggacagccaccagcagccccctctggtctgggaactaatacgatggctacaggcagtggcgcaccaatggcagacaataacgatggcgccgacggagtgggtaattcctcgggaaattggcattgcgattccacatggatgggcgacagagtcatcaccaccagcacccgaacctgggctctgcccacctacaacaaccatctgtacaagcagatttccagccaatcaggagccagcaacgacaaccactactttggctacagcaccccttgggggtattttgacttcaacagattccactgccacttttcaccacgtgactggcaaagactcatcaacaacaactggggattccggcccaagagactcaacttcaagctctttaacattcaagtcagagaggtcacgcagaatgatggtacgacgacgattgccaataaccttaccagcacggttcaggtgtttactgactcggagtaccagctcccgtacgtcctcggctcggcgcatcaaggatgcctcccgccgttcccagcagacgtcttcatggtgccacagtatggatacctcaccctgaacaacgggagtcaggcagtaggacgctcttcattttactgcctggagtacttcccttctcagatgctgcgtaccggaaacaactttaccttcagctacacctttgaggatgttcctttccacagcagctacgctcacagccagagtttggaccgtctcatgaatcctctcatcgaccagtacctgtattacttgagcagaacaaacactccaagcggaaccaccacgcagtccaggcttcagttttctcaggccggagcgagtgacattcgggatcagtctaggaactggcttcctggaccctgttaccgccagcagcgagtatcaaagacatctgcggacaacaacaacagtgaatactcgtggattggagctaccaagtaccacctcaatggcagagactctctggtgaatccgggcccggcaatggccagccacaaggacgatgaagaaaagttttttcctcagagcggggttctcatctttggaaaacaaggatcagagaaaacaaatgtggacattgaaaaggtcatgattacagacgaagaggaaatcagaaccaccaatcccgtggccacggagcagtatggttctgtatctaccaacctccagagcggcaacacacaagcatctactgcagatgtcaacacacaaggcgttcttccaggcatggtctggcaggacagagacgtgtacctgcaggggcctatctgggcaaagattccgcacacggacggacattttcacccctctcccctcatgggcggattcggacttaaacaccctcctccacagattctcatcaaaaacaccccggtacctgcgaatccttcgaccaccttcagtgcggcaaagtttgcttccttcatcacacagtattccacggggcgggtcagcgtggagatcgagtgggagctacagaaggagaacagcaaacgctggaatcccgagatccagtacacttccaactacaacaaatctgttaatgtggactttactgtggacactaatggtgtgtattcagagcctcgccccattggcaccagatacctgactcgtaatctgtaa

SEQ ID NO: 303 - protein, 735 aa, Adeno-associated virus
MAADGYLPDWLEDTLSEGIRQWWKLKPGPPPPKPAERHKDDSRGLVLPGYKYLGPFNGLDKGEPVNEADAAALEHDKAYDRQLDSGDNPYLKYDHADAEFQERLKEDTSFGGNLGRAVFQAKKRVLEPLGLVEEPVKTAPGKKRPVEHSPVEPDSSSGTGKAGNQPARKRLNFGQTGDADSVPDPQPLGQPPAAPSGLGTNTMATGSGAPMADNNDGADGVGNSSGNWHCDSTWMGDRVITTSTRTWALPTYNNHLYKQISSQSGASNDNHYFGYSTPWGYFDFNRFHCHFSPRDWQRLINNNWGFRPKRLNFKLFNIQVREVTQNDGTTTIANNLTSTVQVFTDSEYQLPYVLGSAHQGCLPPFPADVFMVPQYGYLTLNNGSQAVGRSSFYCLEYFPSQMLRTGNNFTFSYTFEDVPFHSSYAHSQSLDRLMNPLIDQYLYYLSRTNTPSGTTTQSRLQFSQAGASDIRDQSRNWLPGPCYRQQRVSKTSADNNNSEYSWIGATKYHLNGRDSLVNPGPAMASHKDDEEKFFPQSGVLIFGKQGSEKTNVDIEKVMITDEEEIRTTNPVATEQYGSVSTNLQSGNTQASTADVNTQGVLPGMVWQDRDVYLQGPIWAKIPHTDGHFHPSPLMGGFGLKHPPPQILIKNTPVPANPSTTFSAAKFASFITQYSTGRVSVEIEWELQKENSKRWNPEIQYTSNYNKSVNVDFTVDTNGVYSEPRPIGTRYLTRNL

SEQ ID NO: 304 - DNA, 2217 bp, Adeno-associated virus
atggctgccgatggttatcttccagattggctcgaggacaacctctctgagggcattcgcgagtggtgggacttgaaacctggagccccgaaacccaaagccaaccagcaaaagcaggacgacggccggggtctggtgcttcctggctacaagtacctcggacccttcaacggactcgacaagggggagcccgtcaacgcggcggacgcagcggccctcgagcacgacaaggcctacgaccagcagctcaaagcgggtgacaatccgtacctgcggtataaccacgccgacgccgagtttcaggagcgtctgcaagaagatacgtcttttgggggcaacctcgggcgagcagtcttccaggccaagaagcgggttctcgaacctctcggtctggttgaggaaggcgctaagacggctcctggaaagaagagaccggtagagccatcaccccagcgttctccagactcctctacgggcatcggcaagacaggccagcagcccgcgaaaaagagactcaactttgggcagactggcgactcagagtcagtgcccgaccctcaaccaatcggagaaccccccgcaggcccctctggtctgggatctggtacaatggctgcaggcggtggcgctccaatggcagacaataacgaaggcgccgacggagtgggtagttcctcaggaaattggcattgcgattccgcatggctgggcgacagagtcatcaccaccagcacccgaccctgggccctccccacctacaacaaccacctctacaagcaaatctccaacgggacatcgggaggaagcaccaacgacaacacctacttcggctacagcaccccctgggggtattttgactttaacagattccactgccacttctcaccacgtgactggcagcgactcatcaacaacaactggggattccggcccaagagactcaacttcaagctcttcaacatccaggtcaaggaggtcacgcagaatgaaggcaccaagaccatcgccaataaccttaccagcacgattcaggtctttacggactcggaataccagctcccgtacgtcctcggctctgcgcaccagggctgcccgcctccgttcccggcggacgtcttcatgattcctcagtacgggtacctgactctgaacaacggcagtcaggccgtgggccgttcctccttctactgcctggagtactttccttctcaaatgcggagaacgggcaacaactttgagttcagctaccagtttgaggacgtgccttttcacagcagctacgcgcatagccaaagcctggaccggctgatgaaccccctcatcgaccagtacctgtactacctgtctcggactcagtccacgggaggtaccgcaggaactcagcagttgctattttctcaggccgggcctaataacatgtcggctcaggccaaaaactggctacccgggccctgctaccggcagcaacgcgtctccacgacactgtcgcaaaataacaacagcaactttgcttggaccggtgccaccaagtatcatctgaatggcagagactctctggtaaatcccggtgtcgctatggcaacgcacaaggacgacgaagagcgattttttccatccagcggagtcttgatgtttgggaaacagggagctggaaaagacaacgtggactatagcagcgttatgctaaccagtgaggaagaaatcaaaaccaccaacccagtggccacagaacagtacggcgtggtggccgataacctgcaacagcaaaacgccgctcctattgtaggggccgtcaacagtcaaggagccttacctggcatggtctggcagaaccgggacgtgtacctgcagggtcctatctgggccaagattcctcacacggacggcaactttcatccttcgccgctgatgggaggctttggactgaaacacccgcctcctcagatcctgattaagaatacacctgttcccgcggatcctccaactaccttcagtcaagccaagctggcgtcgttcatcacgcagtacagcaccggacaggtcagcgtggaaattgaatgggagctgcagaaagagaacagcaagcgctggaacccagagattcagtatacttccaactactacaaatctacaaatgtggactttgctgtcaatactgagggtacttattcagagcctcgccccattggcacccgttacctcacccgtaacctgtaa

SEQ ID NO: 305 - protein, 738 aa, Adeno-associated virus
MAADGYLPDWLEDNLSEGIREWWDLKPGAPKPKANQQKQDDGRGLVLPGYKYLGPFNGLDKGEPVNAADAAALEHDKAYDQQLKAGDNPYLRYNHADAEFQERLQEDTSFGGNLGRAVFQAKKRVLEPLGLVEEGAKTAPGKKRPVEPSPQRSPDSSTGIGKTGQQPAKKRLNFGQTGDSESVPDPQPIGEPPAGPSGLGSGTMAAGGGAPMADNNEGADGVGSSSGNWHCDSAWLGDRVITTSTRPWALPTYNNHLYKQISNGTSGGSTNDNTYFGYSTPWGYFDFNRFHCHFSPRDWQRLINNNWGFRPKRLNFKLFNIQVKEVTQNEGTKTIANNLTSTIQVFTDSEYQLPYVLGSAHQGCPPPFPADVFMIPQYGYLTLNNGSQAVGRSSFYCLEYFPSQMRRTGNNFEFSYQFEDVPFHSSYAHSQSLDRLMNPLIDQYLYYLSRTQSTGGTAGTQQLLFSQAGPNNMSAQAKNWLPGPCYRQQRVSTTLSQNNNSNFAWTGATKYHLNGRDSLVNPGVAMATHKDDEERFFPSSGVLMFGKQGAGKDNVDYSSVMLTSEEEIKTTNPVATEQYGVVADNLQQQNAAPIVGAVNSQGALPGMVWQNRDVYLQGPIWAKIPHTDGNFHPSPLMGGFGLKHPPPQILIKNTPVPADPPTTFSQAKLASFITQYSTGQVSVEIEWELQKENSKRWNPEIQYTSNYYKSTNVDFAVNTEGTYSEPRPIGTRYLTRNL

SEQ ID NO: 306 - protein, 735 aa, Adeno-associated virus
MAADGYLPDWLEDTLSEGIRQWWKLKPGPPPPKPAERHKDDSRGLVLPGYKYLGPFNGLDKGEPVNEADAAALEHDKAYDRQLDSGDNPYLKYNHADAEFQERLKEDTSFGGNLGRAVFQAKKRVLEPLGLVEEPVKTAPGKKRPVEHSPVEPDSSSGTGKAGQQPARKRLNFGQTGDADSVPDPQPLGQPPAAPSGLGSTTMATGSGAPMADNNEGADGVGNSSGNWHCDSQWLGDRVITTSTRTWALPTYNNHLYKQISSQSGASNDNHYFGYSTPWGYFDFNRFHCHFSPRDWQRLINNNWGFRPKRLNFKLFNIQVKEVTQNDGTTTIANNLTSTVQVFTDSEYQLPYVLGSAHQGCLPPFPADVFMVPQYGYLTLNNGSQAVGRSSFYCLEYFPSQMLRTGNNFQFSYTFEDVPFHSSYAHSQSLDRLMNPLVDQYLYYLNKTQTNSGTLQQSRLLFSQAGPTNMSLQAKNWLPGPCYRQQRLSKQANDNNNSNFPWTAATKYHLNGRDSLVNPGPAMASHKDDEEKFFPMHGTLIFGKQGTNANDADLENVMITDEEEIRTTNPVATEQYGTVSNNLQNSNTGPTTGTVNHQGALPGMVWQDRDVYLQGPIWAKIPHTDGHFHPSPLMGGFGLKHPPPQIMIKNTPVPANPPTNFSSAKFASFITQYSTGQVSVEIEWELQKENSKRWNPEIQYTSNYNKSVNVDFTVDTNGVYSEPRPIGTRYLTRNL

SEQ ID NO: 307 - DNA, 3158 bp, Adeno-associated virus
gattgaatttagcggccgcgaattcgcccttgctgcgtcaactggaccaatgagaactttcctttcaatgattgcgtcgacaagatggtgatctggtgggaggagggaaagatgaccgccaaggtcgtggagtcggccaaagccattctcggaggaagcaaggtgcgcgcggaccagaaatgcaagtcctcggcccagatagacccgactcccgtgattgtcacctccaacaccaacatgtgcgccgtgattgacgggaactcaacgaccttcgaacaccagcagccgttgcaagaccggatgttcaaatttgaactcacccgccgtctggatcatgactttgggaaggtcaccaagcaggaagtcaaagactttttccggtgggcaaaggatcacgtggttgaggtggagcatgaattctacgtcaaaaagggtggagctaagaaaagacccgcccccagtgacgcagatataagtgagcccaaacgggcgcgcgagtcagttgcgcagccatcgacgtcagacgcggaagcttcgatcaactacgcgggcaggtaccaaaacaaatgttctcgtcacgtgggcatgaatctgatgctgtttccctgcagacaatgcgagagaatgaatcagaattcaaatatctgcttcactcacggacagaaagactgtttagagtgctttcccgtgtcagaatctcaacccgtttctgtcgtcaaaaaggcgtatcagaaactttgctacattcatcatatcatgggaaaggtgccagacgcttgcactgcctgcgatctggtcaatgtggatttggatgactgcatctctgaacaataaatgatttaaatcaggtatggctgccgatggttatcttccagattggctcgaggacactctctctgaaggaataagacagtggtggaagctcaaacctggcccaccaccaccaaagcccgcagagcggcataaggacgacagcaggggtcttgtgcttcctgggtacaagtacctcggacccttcaacggactcgacaagggggagccggtcaacgaggcagacgccgcggccctcgagcacgacaaggcctacgaccggcagctcgacagcggagacaacccgtacctcaagtacaaccacgccgacgcggagtttcaggagcgccttaaagaagatacgtcttttgggggcaacctcggacgagcagtcttccaggcaaaaaagagggttcttgaacctctgggcctggttgaggaacctgttaaaacggctccgggaaaaaagaggccggtagagcactctcctgtggagccagactcctcctcgggaaccggaaaagcgggccagcagcctgcaagaaaaagattgaatttcggtcagactggagacgcagactccgtacctgacccccagcctctcggacagccaccagcagccccctctggtctgggatctactacaatggctacaggcagtggcgcaccaatggcagacaataacgagggtgccgatggagtgggtaattcctcgggaaattggcattgcgattcccaatggctgggcgacagagtcatcaccaccagcacccgcacctgggccctgcccacctacaacaaccacctctacaagcaaatctccagccaatcaggagcctcaaacgacaaccactactttggctacagcaccccctgggggtattttgacttcaacagattccactgccacttttcaccacgtgactggcaaagactcatcaacaacaactggggattccgacccaagagactcaacttcaagctctttaacattcaagtcaaagaggtcacgcagaatgacggtacgacgacgattgccaataaccttaccagcacggttcaggtgtttactgactcggagtaccagctcccgtacgtcctcggctcggcgcatcaaggatgcctcccgccgtttccagcggacgtcttcatggtcccacagtatggatacctcaccctgaacaacgggagtcaggcagtaggacgctcttcattttactgcctggagtactttccttctcagatgctgcgtaccggaaacaactttcaattcagctacacttttgaagacgtgcctttccacagcagctacgctcacagccagagtctggatcggctgatgaatcctctggtcgaccagtacctgtattatctgaacaagacacaaacaaatagtggaactcttcagcagtctcggctactgtttagccaagctggacccaccaacatgtctcttcaagctaaaaactggctgcctggaccttgctacagacagcagcgtctgtcaaagcaggcaaacgacaacaacaacagcaactttccctggactgcagctacaaagtatcatctaaatggccgggactcgttggttaatccaggaccagctatggccagtcacaaggatgacgaagaaaagtttttccccatgcatggaacccttatatttggtaaacaaggaacaaatgccaacgacgcggatttggaaaatgtcatgattacagatgaagaagaaatcaggaccaccaatcccgtggctacggagcagtacggaactgtatcaaataatttgcaaaactcaaacactggtccaactactggaactgtcaatcaccaaggagcgttacctggtatggtgtggcaggatcgagacgtgtacctgcagggacccatttgggccaagattcctcacaccgatggacactttcatccttctccactgatgggaggttttggactcaaacacccacctcctcaaatcatgatcaaaaacactcccgttccagccaatcctcccacaaacttcagttctgccaagtttgcttctttcatcacacagtattccacggggcaggtcagcgtggagatcgagtgggagctgcagaaggagaacagcaaacgctggaatcccgaaattcagtacacttccaactacaacaaatctgttaatgtggactttactgtggacactaatggtgtgtattcagagcctcgccccattggcaccagatacctgactcgtaatctgtaattgcttgttaatcaataaaccgtttaattcgtttcagttgaactttggtctctgcgaagggcgaattcgtttaaacctgcaggactagtccctttagtga

SEQ ID NO: 308 - protein, 735 aa, Adeno-associated virus
MAADGYLPDWLEDTLSEGIRQWWKLKPGPPPPKPAERHKDDSRGLVLPGYKYLGPFNGLDKGEPVNEADAAALEHDKAYDRQLDSGDNPYLKYNHADAEFQERLKEDTSFGGNLGRAVFQAKKRVLEPLGLVEEPVKTAPGKKRPVEHPPVEPDSSSGTGKAGQQPARKRLNFGQTGDADSVPDPQPLGQPPAAPSGLGSTTMATGSGAPMADNNEGADGVGNSSGNWHCDSQWLGDRVITTSTRTWALPTYNNHLYKQISSQSGASNDNHYFGYSTPWGYFDFNRFHCHFSPRDWQRLINNNWGFRPKRLNFKLFNIQVKEVTQNDGTTTIANNLTSTVQVFTDSEYQLPYVLGSAHQGCLPPFPADVFMVPQYGYLTLNNGSQAVGRSSFYCLEYFPSQMLRTGNNFQFSYTFEDVPFHSSYAHSQSLDRLMNPLIDQYLYYLNKTQTNSGTLQQSRLLFSQAGPTNMSLQAKNRLPGPCYRQQRLSKQANDNNNSNFPWTAATKYHLNGRDSLVNPGPAMASHKDDEEKFFPMHGTLIFGKQGTNANDADLENVMITDEEEIRTTNPVATEQYGTVSNNLQNSNTGPTTGTVNHQGALPGMVWQDRDVYLQGPIWAKIPHTDGHFHPSPLVGGFGLKHPPPQIMIKNTPVPANPPTNFSSAKFASFITQYSTGQVSVEIEWELQKENSKRWNPEIQYTSNYNKSVNVDFTVDTNGVYSEPRPIGTRYLTRNL

SEQ ID NO: 309 - DNA, 3159 bp, Adeno-associated virus
gattgaatttagcggccgcgaattcgcccttgctgcgtcaactggaccaatgagaactttcctttcaatgattgcgtcgacaagatggtgatctggtgggaggagggaaagatgaccgccaaggtcgtggagtcggccaaagccattctcggaggaagcaaggtgcgcgtggaccagaaatgcaagtcctcggcccagatagacccgactcccgtgattgtcacctccaacaccgacatgtgcgccgtgattgacgggaactcaacgaccttcgaacaccagcagccgttgcaagaccggatgttcaaatttgaactcacccgccgtctggatcatgactttgggaaggtcaccaagcaggaagtcaaagactttttccggtgggcaaaggatcacgtggttgaggtggagcatgaattctacgtcaaaaagggtggagctaagaaaagacccgcccccagtgacgcagatataagtgagcccaaacgggcgcgcgagtcagttgcgcagccatcgacgtcagacgcggaagcttcgatcaactacgcggacaggtaccaaaacaaatgttctcgtcacgtgggcatgaatctgatgctgtttccctgcagacaatgcgagagaatgaatcagaattcaaatatctgcttcactcacggacagaaagactgtttagagtgctttcccgtgtcagaatctcaacccgtttctgtcgtcaaaaaggcgtatcagaaactttgctacattcatcatatcatgggaaaggtgccagacgcttgcactgcctgcgatctggtcaatgtggatttggatgactgcatctctgaacaataaatgatttaaatcaggtatggctgccgatggttatcttccagattggctcgaggacactctctctgaaggaataagacagtggtggaagctcaaacctggcccaccaccaccaaagcccgcagagcggcataaggacgacagcaggggtcttgtgcttcctgggtacaagtacctcggacccttcaacggactcgacaagggggagccggtcaacgaggcagacgccgcggccctcgagcacgacaaggcctacgaccggcagctcgacagcggagacaacccgtacctcaagtacaaccacgccgacgcggagtttcaggagcgccttaaagaagatacgtcttttgggggcaacctcggacgagcagtcttccaggcaaaaaagagggttcttgaacctctgggcctggttgaggaacctgttaaaacggctccgggaaaaaagaggccggtagagcaccctcctgtggagccagactcctcctcgggaaccggaaaagcgggccagcagcctgcaagaaaaagattgaatttcggtcagactggagacgcagactccgtacctgacccccagcctctcggacagccaccagcagccccctctggtctgggatctactacaatggctacaggcagtggcgcaccaatggcagacaataacgagggtgccgatggagtgggtaattcctcgggaaattggcattgcgattcccaatggctgggcgacagagtcatcaccaccagcacccgcacctgggccctgcccacctacaacaaccacctctacaagcaaatctccagccaatcaggagcctcaaacgacaaccactactttggctacagcaccccctgggggtattttgacttcaacagattccactgccacttttcaccacgtgactggcaaagactcatcaacaacaactggggattccgacccaagagactcaacttcaagctctttaacattcaagtcaaagaggtcacgcagaatgacggtacgacgacgattgccaataaccttaccagcacggttcaggtgtttactgactcggagtaccagctcccgtacgtcctcggctcggcgcatcaaggatgcctcccgccgtttccagcggacgtcttcatggtcccacagtatggatacctcaccctgaacaacgggagtcaggcagtaggacgctcttcattttactgcctggagtactttccttctcagatgctgcgtaccggaaacaactttcagttcagctacacttttgaagacgtgcctttccacagcagctacgctcacagccagagtctggatcggctgatgaatcctctgatcgaccagtacctgtattatctgaacaagacacaaacaaatagtggaactcttcagcagtctcggctactgtttagccaagctggacccaccaacatgtctcttcaagctaaaaaccggctgcctggaccttgctacagacagcagcgtctgtcaaagcaggcaaacgacaacaacaacagcaactttccctggaccgcagctacaaagtatcatctaaatggccgggactcgttggttaatccaggaccagctatggccagtcacaaggatgacgaagaaaagtttttccccatgcatggaacccttatatttggtaaacaaggaacaaatgccaacgacgcggatttggaaaatgtcatgattacagatgaagaagaaatcaggaccaccaatcccgtggctacggagcagtacggaactgtatcaaataatttgcaaaactcaaacactggtccaactactggaactgtcaatcaccaaggagcgttacctggtatggtgtggcaggatcgagacgtgtacctgcagggacccatttgggccaagattcctcacaccgatggacactttcatccttctccactggtgggaggttttggactcaaacacccacctcctcaaatcatgatcaaaaacactcccgttccagccaatcctcccacaaacttcagttctgccaagtttgcttctttcatcacacagtattccacggggcaggtcagcgtggagatcgagtgggagctgcagaaggagaacagcaaacgctggaatcccgaaattcagtacacttccaactacaacaaatctgttaatgtggactttactgtggacactaatggtgtgtattcagagcctcgccccattggcaccagatacctgactcgtaatctgtaattgcttgttaatcaataaaccgtttaattcgtttcagttgaactttggtctctgcgaagggcgaattcgtttaaacctgcaggactagtccctttagtgag

SEQ ID NO: 310 - DNA, 2208 bp, Adeno-associated virus
atggctgccgatggttatcttccagattggctcgaggacactctctctgaaggaataagacagtggtggaagctcaaacctggcccaccaccaccaaagcccgcagagcggcataaggacgacagcaggggtcttgtgcttcctgggtacaagtaccttggacccttcaacggactcgacaagggagagccggtcaacgaggcagacgccgcggccctcgagcacgacaaggcctacgaccggcagctcgacagcggagacaacccgtaccccaagtacaaccacgccgacgcggagttccaggagcgtcttaaagaagatacgtcttttgggggcaacctcggacgagcagtcttccaggcgaaaaagagggttcttgaacctctgggcctggttgaggaacctgttaagacggctccgggaaaaaagaggccggtagagcactctcctgcggagccagactcctcctcgggaaccggaaaagcgggccagcagcctgcaagaaagagattgaatttcggtcagactggagacgcagactccgtacctgacccccagcctctcggacagccaccagcagccccctctggtctgggaactaatacgatggctacaggcagtggcgcaccaatggcagacaataacgagggcgccgacggagtgggtaattcctcgggaaattggcattgcgattccacatggatgggcgacagagtcatcaccaccagcacccgcacctgggctctgcccacctacaacaaccacctctacaagcagatttccagccaatcaggagcctcaaacgacaaccactactttggctacagcaccccttgggggtattttgacttcaacagattccactgccacttttcgccacgtgactggcaaagactcatcaacaacaattggggattccggcccaaaagactcaacttcaagctctttaacattcaagtcaaggaggtcacgcagaatgacggtacgacgacgattgccaataaccttaccagcacggttcaggtgtttactgactcggagtaccagctcccgtacgtcctcggctcggcgcatcaaggatgcctcccgccgttcccagcagacgtcttcatggtgccacagtatggatacctcaccctgaacaacgggagtcaggcagtaggacgctcttcattttactgcctggagtactttccttctcagatgctgcgtaccggaaacaactttaccttcagctacacctttgaggacgttcctttccacagcagctacgcccacagccagagtttggaccgtctcatgaatcctctcatcgaccagtacctgtattacttgagcagaacaaacactccaagcggaaccaccacgcagtcaaggcttcagttttctcaggccggagcaagtgacattcgggaccagtctaggaactggcttcctggaccctgttaccgccagcagcgagtatcaaagacatctgcggataacaacaacagtgaatactcgtggactggagctaccaagtaccaccttaatggaagagactctctggtgaatccgggcccggccatggccagccacaaggacgatgaagaaaagttttttcctcagagcggggttctcatctttggaaaacaagactcgggaaaaactaatgtggacattgaaaaggtcatgattacagacgaagaggaaatcaggaccaccaatcccgtggctacggagcagtatggttctgtatctaccaacctccagagcggcaacacacaagcagctacctcagatgtcaacacacaaggcgttcttccaggcatggtgtggcaggacagagacgtgtacctgcaggggcccatctgggcaaagattccacacacggacggacattttcacccctctcccctcatgggcggattcggacttaaacaccctcccccgcagattctcatcaagaacaccccggtacctgcgaatccttcgactaccttcagtgcggcaaagtttgcttccttcattacacagtactccacggggcaggtcagcgtggagatcgagtgggagctgcagaaggagaacagcaaacgctggaatcccgagattcagtacacttccaactacaacaaatctgttaatgtggactttactgtggacactaatggtgtgtattcagagcctcgccccattggcaccaggtacctgactcgtaatctgtaa

SEQ ID NO: 311 - protein, 735 aa, Adeno-associated virus
MAADGYLPDWLEDTLSEGIRQWWKLKPGPPPPKPAERHKDDSRGLVLPGYKYLGPFNGLDKGEPVNEADAAALEHDKAYDRQLDSGDNPYPKYNHADAEFQERLKEDTSFGGNLGRAVFQAKKRVLEPLGLVEEPVKTAPGKKRPVEHSPAEPDSSSGTGKAGQQPARKRLNFGQTGDADSVPDPQPLGQPPAAPSGLGTNTMATGSGAPMADNNEGADGVGNSSGNWHCDSTWMGDRVITTSTRTWALPTYNNHLYKQISSQSGASNDNHYFGYSTPWGYFDFNRFHCHFSPRDWQRLINNNWGFRPKRLNFKLFNIQVKEVTQNDGTTTIANNLTSTVQVFTDSEYQLPYVLGSAHQGCLPPFPADVFMVPQYGYLTLNNGSQAVGRSSFYCLEYFPSQMLRTGNNFTFSYTFEDVPFHSSYAHSQSLDRLMNPLIDQYLYYLSRTNTPSGTTTQSRLQFSQAGASDIRDQSRNWLPGPCYRQQRVSKTSADNNNSEYSWTGATKYHLNGRDSLVNPGPAMASHKDDEEKFFPQSGVLIFGKQDSGKTNVDIEKVMITDEEEIRTTNPVATEQYGSVSTNLQSGNTQAATSDVNTQGVLPGMVWQDRDVYLQGPIWAKIPHTDGHFHPSPLMGGFGLKHPPPQILIKNTPVPANPSTTFSAAKFASFITQYSTGQVSVEIEWELQKENSKRWNPEIQYTSNYNKSVNVDFTVDTNGVYSEPRPIGTRYLTRNL

SEQ ID NO: 312 - DNA, 2208 bp, Adeno-associated virus
atggctgccgatggttatcttccagattggctcgaggacactctctctgaaggaataagacagtggtggaagctcaaacctggcccaccaccaccaaagcccgcagagcggcataaggacgacagcaggggtcttgtgcttcctgggtacaagtaccttggacccttcaacggactcgacaagggagagccggtcaacgaggcagacgccgcggccctcgagcacgacaaggcctacgaccggcagctcgacggcggagacaacccgtacctcaagtacaaccacgccgacgcggagttccaggagcgtcttaaagaagatacgtcttttgggggcaacctcggacgagcagtcttccaggcgaaaaagagggttcttgaacctctgggcctggttgaggaacctgttaagacggctccgggaaaaaagaggccggtagagcactctcttgcggagccagactcctcctcgggaaccggaaaagcgggccagcagcctgcaagaaggagattgaatttcggtcagactggagacgcagactccgtacctgacccccagcctctcggacagccaccagcagccccctctggtctgggaactaatacgatggctacaggcagtggcgcaccaatggcagacaataacgagggcgccgacggagtgggtaattcctcgggaaattggcattgcgattccacatggatgggcgacagagtcatcaccaccagcacccgcacctgggctctgcccacctacaacaaccacctctacaggcagatttccagccaatcaggagcctcaaacgacaaccactactttggctacagcaccccttgggggtattttgacttcaacagattccactgccacttttcgccacgtgactggcaaagactcatcaacaacaattggggatcccggcccaaaagactcaacttcaagctctttaacattcaagtcaaggaggtcacgcagaatgacggtacgacgacgattgccaataaccttaccagcacggttcaggtgtttactgactcggagtaccagctcccgtacgtcctcggctcggcgcatcaaggatgcctcccgccgttcccagcagacgtcttcatggtgccacagtatggatacctcaccctgaacaacgggagtcaggcagtaggacgctcttcattttactgcctggagtactttccttctcagatgctgcgtaccggaaacaactttaccttcagctacacctttgaggacgttcctttccacagcagctacgcccacagccagagtttggaccgtctcatgaatcctctcgtcgaccagtacctgtattacttgagcagaacaaacactccaagcggaaccaccacgcagtcaaggcttcagttttctcaggccggagcaagtgacattcgggaccagtctaggaactggcttcctggaccctgttaccgccagcagcgagtatcaaagacatctgcggataacaacaacagtgaatactcgtggactggagctaccaagtaccaccttaatggaagagactctctggtgaatccgggcccggccatggccagccacaaggacgatgaagaaaagttttttcctcagagcggggttctcatctttggaaaacaagactcgggaaaaactaatgtggacattgaaaaggtcatgattacagacgaagaggaaatcaggaccaccaatcccgtggctacggagcagtatggttctgtatctaccaacctccagagcggcaacacacaagcagctacctcagatgtcaacacacaaggcgttcttccaggcatggtgtggcaggacagagacgtgtacctgcaggggcccatctgggcaaagattccacacacggacggacattttcacccctctcccctcatgggcggattcggacttaaacaccctcccccgcagattctcatcaagaacaccccggtacctgcgaatccttcgactaccttcagtgcggcaaagtttgcttccttcattacacagtactccacggggcaggtcagcgtggagatcgagtgggagctgcagaaggagaacagcaaacgctggaatcccgagattcagtacacttccaactacaacaaatctgttaatgtggactttactgtggacactaatggtgtgtattcagagcctcgccccattggcaccagatacctgactcgtaatctgtaa

SEQ ID NO: 313 - protein, 735 aa, Adeno-associated virus
MAADGYLPDWLEDTLSEGIRQWWKLKPGPPPPKPAERHKDDSRGLVLPGYKYLGPFNGLDKGEPVNEADAAALEHDKAYDRQLDGGDNPYLKYNHADAEFQERLKEDTSFGGNLGRAVFQAKKRVLEPLGLVEEPVKTAPGKKRPVEHSLAEPDSSSGTGKAGQQPARRRLNFGQTGDADSVPDPQPLGQPPAAPSGLGTNTMATGSGAPMADNNEGADGVGNSSGNWHCDSTWMGDRVITTSTRTWALPTYNNHLYRQISSQSGASNDNHYFGYSTPWGYFDFNRFHCHFSPRDWQRLINNNWGSRPKRLNFKLFNIQVKEVTQNDGTTTIANNLTSTVQVFTDSEYQLPYVLGSAHQGCLPPFPADVFMVPQYGYLTLNNGSQAVGRSSFYCLEYFPSQMLRTGNNFTFSYTFEDVPFHSSYAHSQSLDRLMNPLVDQYLYYLSRTNTPSGTTTQSRLQFSQAGASDIRDQSRNWLPGPCYRQQRVSKTSADNNNSEYSWTGATKYHLNGRDSLVNPGPAMASHKDDEEKFFPQSGVLIFGKQDSGKTNVDIEKVMITDEEEIRTTNPVATEQYGSVSTNLQSGNTQAATSDVNTQGVLPGMVWQDRDVYLQGPIWAKIPHTDGHFHPSPLMGGFGLKHPPPQILIKNTPVPANPSTTFSAAKFASFITQYSTGQVSVEIEWELQKENSKRWNPEIQYTSNYNKSVNVDFTVDTNGVYSEPRPIGTRYLTRNL

SEQ ID NO: 314 - protein, 738 aa, Adeno-associated virus
MAADGYLPDWLEDNLSEGIREWWDLKPGAPKPKANQQKQDDGRGLVLPGYKYLGPFNGLDKGEPVNAADAAALEHDKAYDQQLKAGDNPYLRYNHADAEFQERLQEDTSFGGNLGRAVFQAKKRVLEPLGLVEEAAKTAPGKKRPVEPSPQRSPDSSAGIGKKGQQPAKKRLNFGQTGDSESVPDPQPIGEPPAGPSGLGSGTMAAGGGAPMADNNEGADGVGSSSGNWHCDSTWLGDRVITTSTRTWALPTYNNHLYKQISNGTSGGSTNDNTYFGYSTPWGYFDFNRFHCHFSPRDWQRLINNNWGFRPKRLSFKLFNIQVKEVTQNEGTETIANNLTSTIQVFTDSEYQLPYVLGSAHQGCLPPFPADVFMIPQYGYLTLNNGSQAVGRSSFYCLEYFPSQMLRTGNNFEFSYTFEDVPFHSSCAHSQSSDRLMNPLIDQYLYYLSRTRSTGGTQGTQQLLFSQAGPANMSAQAKNWLPGPCYRQQRVSTTLSQNNNSNFAWTGATKYHLNGRDSLVNPGVAMATHKDDEERFFPSSGVLMFGKQGAGRDNVDYSSVMLTSEEEIKTTNPVATEQYGVVADNLQQTNTGPIVGNVNSQGALPGMVWQNRDVYLQGPIWAKIPHTDGNFHPSPLMGGFGLKHPPPQILIKNTPVPADPPTTFSQAKLASFITQYSTGQVSVEIEWELQKENSKRWNPEIQYTSNYYKSTNVDFAVNTEGTYSEPRPIGTRYLTRNL

SEQ ID NO: 315 - DNA, 2217 bp, Adeno-associated virus
atggctgctgacggttatcttccagattggctcgaggacaacctctctgagggcattcgcgagtggtgggacctgaaacctggagcccccaagcccaaggccaaccagcagaagcaggacgacggccggggtctggtgcttcttggctacaagtacctcggacccttcaacggactcgacaagggggagcccgtcaatgcggcggacgcagcggccctcgagcacgacaaggcctacgaccagcagctcaaagcgggtgacaatccgtacctgcggtataaccacgccgacgccgagtttcaggagcgtctgcaagaagatacgtcttttgggggcaacctcgggcgagcagtcttccaggccaagaagcgggttctcgaacctctcggtctggttgaggaagctgctaagacggctcctggaaagaagagaccggtagaaccgtcacctcagcgttcccccgactcctccacgggcatcggcaagaaaggccagcagcccgctaaaaagagactgaactttggtcagactggcgactcagagtcagtccccgaccctcaaccaatcggagaaccaccagcaggcccctctggtctgggatctggtacaatggctgcaggcggtggcgctccaatggcagacaataacgaaggcgccgacggagtgggtagttcctcaggaaattggcattgcgattccacatggctgggcgacagagtcatcaccaccagcacccgaacctgggccctgcccacctacaacaaccacctctacaagcaaatatccaatgggacatcgggaggaagcaccaacgacaacacctacttcggctacagcaccccctgggggtattttgacttcaacagattccactgccacttctcaccacgtgactggcagcgactcatcaacaacaactggggattccggccaaaaagactcagcttcaagctcttcaacatccaggtcaaggaggtcacgcagaatgaaggcaccaagaccatcgccaataaccttaccagcacgattcaggtatttacggactcggaataccagctgccgtacgtcctcggctccgcgcaccagggctgcctgcctccgttcccggcggacgtcttcatgattccccagtacggctaccttacactgaacaatggaagtcaagccgtaggccgttcctccttctactgcctggaatattttccatctcaaatgctgcgaactggaaacaattttgaattcagctacaccttcgaggacgtgcctttccacagcggctacgcacacagccagagcttggaccgactgatgaatcctctcatcgaccagtacctgtactacttatccagaactcagtccacaggaggaactcaaggtacccagcaattgttattttctcaagctgggcctgcaaacatgtcggctcaggctaagaactggctacctggaccttgctaccggcagcagcgagtctctacgacactgtcgcaaaacaacaacagcaactttgcttggactggtgccaccaaatatcacctgaacggaagagactctttggtaaatcccggtgtcgccatggcaacccacaaggacgacgaggaacgcttcttcccgtcgagtggagtcctgatgtttggaaaacagggtgctggaagagacaatgtggactacagcagcgttatgctaaccagcgaagaagaaattaaaaccactaaccctgtagccacagaacaatacggtgtggtggctgacaacttgcagcaaaccaatacagggcctattgtgggaaatgtcaacagccaaggagccttacctggcatggtctggcagaaccgagacgtgtacctgcagggtcccatctgggccaagattcctcacacggacggcaacttccacccttcaccgctaatgggaggatttggactgaagcacccacctcctcagatcctgatcaagaacacgccggtacctgcggatcctccaacgacgttcagccaggcgaaattggcttccttcattacgcagtacagcaccggacaggtcagcgtggaaatcgagtgggagctgcagaaggagaacagcaaacgctggaacccagagattcagtacacttcaaactactacaaatctacaaatgtggactttgctgtcaatacagagggaacttattctgagcctcgccccattggtactcgttacctcacccgtaatctgtaa

SEQ ID NO: 316 - protein, 738 aa, Adeno-associated virus
MAADGYLPDWLEDNLSEGIREWWDLKPGAPKPKANQQKQDDGRGLVLLGYKYLGPFNGLDKGEPVNAADAAALEHDKAYDQQLKAGDNPYLRYNHADAEFQERLQEDTSFGGNLGRAVFQAKKRVLEPLGLVEEAAKTAPGKKRPVEPSPQRSPDSSTGIGKKGQQPAKKRLNFGQTGDSESVPDPQPIGEPPAGPSGLGSGTMAAGGGAPMADNNEGADGVGSSSGNWHCDSTWLGDRVITTSTRTWALPTYNNHLYKQISNGTSGGSTNDNTYFGYSTPWGYFDFNRFHCHFSPRDWQRLINNNWGFRPKRLSFKLFNIQVKEVTQNEGTKTIANNLTSTIQVFTDSEYQLPYVLGSAHQGCLPPFPADVFMIPQYGYLTLNNGSQAVGRSSFYCLEYFPSQMLRTGNNFEFSYTFEDVPFHSGYAHSQSLDRLMNPLIDQYLYYLSRTQSTGGTQGTQQLLFSQAGPANMSAQAKNWLPGPCYRQQRVSTTLSQNNNSNFAWTGATKYHLNGRDSLVNPGVAMATHKDDEERFFPSSGVLMFGKQGAGRDNVDYSSVMLTSEEEIKTTNPVATEQYGVVADNLQQTNTGPIVGNVNSQGALPGMVWQNRDVYLQGPIWAKIPHTDGNFHPSPLMGGFGLKHPPPQILIKNTPVPADPPTTFSQAKLASFITQYSTGQVSVEIEWELQKENSKRWNPEIQYTSNYYKSTNVDFAVNTEGTYSEPRPIGTRYLTRNL

SEQ ID NO: 317 - protein, 735 aa, Adeno-associated virus
MAADGYLPDWLEDTLSEGIRQWWKLKPGPPPPKPAERHKDDSRGLVLPGYKYLGPFNGLDKGEPVNEADAAALEHDKAYDRQLDSGDNPYLKYNHADAEFQERLKEDTSFGGNLGRAVFQAKKRVLEPLGLVEPPVKTAPGKKRPVEHSPAEPDSSSGTGKAGQQPARKRLNFGQTGDADSVPDPQPLGQPPAAPSGLGSTTMATGSGAPMADNNEGADGVGNSSGNWHCDSQWLGDRVITTSTRTWALPTYNNHLYKQISSQSGASNDNHYFGYSTPWGYFDFNRFHCHFSPRDWQRLINNNWGFRPKRLNFKLFNIQVKEVTQNDGTTTIANNLTSTVQVFTDSEYQLPYVLGSAHQGCLPPFPADVFMVPQYGYLTLNNGSQAVGRSSFYCLEYFPSQMLRTGNNFQFSYTFEDVPFHSSYAHSQSLDRLMNPLIDQYLYYLNKTQSNSGTLQQSRLLFSQAGPTSMSLQAKNWLPGPCYRQQRLSKQANDNNNSNFPWTAATKYHLNGRDSLVNPGPAMASHKDDEEKFFPMHGTLIFGKQGTNANDADLDNVMITDEEEIRTTNPVATEQYGYVSNNLQNSNTGPTTGTVNHQGALPGMVWQDRDVYLQGPIWAKIPHTDGHFHPSPLMGGFGLKHPPPQIMIKNTPVPANPPTNFSSAKFASFITQYSTGQVSVEIEWELQKENSKRWNPEIQYTSNYNKSVNVDFTVDTNGVYSEPRPIGTRYLTRNL

SEQ ID NO: 318 - protein, 735 aa, Adeno-associated virus
MAADGYLPDWLEDTLSEGIRQWWKLKPGPPPPKPAERHKDDSRGLVLPGYKYLGPFNGLDKGEPVNEADAAALEHDKAYDRQLDSGDNPYLKYNHADAEFQERLKEDTSFGGNLGRAVFQAKKRVLEPLGLVEGPVKTAPGKKRPVEHSPAEPDSSSGTGKAGQQPARKRLNFGQTGDADSVPDPQPLGQPPAAPSGLGSTTMATGSGAPMADNNEGADGVGNSSGNWHCDSQWLGDRVITTSTRTWALPTYNNHLYKQISSQSGASNDNHYFGYSTPWGYFDFNRFHCHFSPRDWQRLINNNWGFRPKRLNFKLFNIQVKEVTQNDGTTTIANNLTSTVQVFTDSEYQLPYVLGSAHQGCLPPFPADVFMVPQYGYLTLNNGSQAVGRSSFYCLEYFPSQMLRTGNNFQFSYTFEDVPFHSSYAHSQSLDRLMNPLIDQYLYYLNKTQSNSGTLQQSRLLFSQAGPTSMSLQAKNWLPGPCYRQQRLSKQANDNNNSNFPWTAATKYHLNGRDSLVNPGPAMASHKDDEEKFFPMHGTLIFGKQGTNANDADLDNVMITDEEEIRTTNPVATEQYGYVSNNLQNSNTGPTTGTVNHQGALPGMVWQDRDVYLQGPIWAKIPHTDGHFHPSPLMGGFGLKHPPPQIMIKNTPVPANPPTNFSSAKFASFITQYSTGQVSVEIEWELQKENSKRWNPEIQYTSNYNKSVNVDFTVDTNGVYSEPRPIGTRYLTRNL

SEQ ID NO: 319 - DNA, 2208 bp, Adeno-associated virus
atggctgccgatggttatcttccagattggctcgaggacactctctctgaaggaataagacagtggtggaagctcaaacctggcccaccaccaccaaagcccgcagagcggcataaggacgacagcaggggtcttgtgcttcctgggtacaagtacctcggacccttcaacggactcgacaagggggagccggtcaacgaggcagacgccgcggccctcgagcacgacaaggcctacgaccggcagctcgacagcggagacaacccgtacctcaagtacaaccacgccgacgcggagtttcaggagcgtcttaaagaagatacgtcttttgggggcaacctcggacgagcagtcttccaggcgaaaaagagggttcttgaacctctgggcctggttgagggacctgttaagacggctccgggaaaaaagaggccggtagagcactctcctgcggagccagactcctcctcgggaaccggaaaagcgggccagcagcctgcaagaaaaagattgaattttggtcagactggagacgcagactccgtacctgacccccagcctctcggacagccaccagcagccccctctggtttgggatctactacaatggctacaggcagtggcgcaccaatggcagacaataacgagggtgccgatggagtgggtaattcctcaggaaattggcattgcgattcccaatggctgggcgacagagtcatcaccaccagcacccgaacctgggccctgcccacctacaacaaccacctctacaagcaaatctcaagccaatcaggagcctcaaacgacaaccactactttggctacagcaccccttgggggtattttgacttcaacagattccactgccacttttcaccacgtgactggcaaagactcatcaacaacaactggggattccgacccaagagactcaacttcaagctctttaacattcaagtcaaagaggtcacgcagaatgacggtacgacgacgattgccaataaccttaccagcacggttcaggtgtttactgactcggagtaccagctcccgtacgtcctcgggtcggcgcatcaaggatgcctcccgccgtttccagcggacgtcttcatggtcccacagtatggatacctcaccctgaacaacgggagtcaggcggtaggacgctcttccttttactgcctggagtactttccttctcagatgcttcgtactggaaacaactttcagttcagctacacctttgaagacgttcctttccacagcagctacgctcacagccagagtctggatcggctgatgaatcctctgatcgaccagtacctgtattatctgaacaaaacacaatcaaatagtggaactcttcagcagtctcggctactgtttagtcaagctggacccaccagcatgtctcttcaagctaaaaactggctacctggaccttgctacagacagcagcgtctgtcaaagcaggcaaacgacaacaacaacagcaactttccctggactgcggctacaaagtatcacctaaatggccgggactcgttggttaatccaggaccagctatggccagtcacaaagacgatgaagaaaagtttttccccatgcatggaaccctgatatttggtaaacaaggaacaaatgctaacgacgcggatttggacaatgtcatgattacagatgaagaagaaatccgcaccaccaatcccgtggctacggagcagtacggatatgtgtcaaataatttgcaaaactcaaatactggtccaactactggaactgtcaatcaccaaggagcgttacctggcatggtgtggcaggatcgagacgtgtacctgcagggacccatttgggccaagattcctcacaccgatggacactttcatccttctccactgatgggaggttttgggctcaaacacccgcctcctcagatcatgatcaaaaacactcccgttccagccaatcctcccacaaacttcagttctgccaagtttgcttctttcatcacacagtattccacggggcaggtcagcgtggagatcgagtgggagctgcagaaagagaacagcaaacgctggaatcccgaaattcagtacacttccaactacaacaaatctgttaatgtggactttactgtggacactaatggcgtgtattcagagcctcgccccattggcaccagatacctgactcgtaatctgtaa

SEQ ID NO: 320 - DNA, 2211 bp, Adeno-associated virus; identical to SEQ ID NO: 1

SEQ ID NO: 321 - DNA, 2208 bp, Adeno-associated virus
atggctgccgatggttatcttccagattggctcgaggacactctctctgaaggaacaagacagtggtggaagctcaaacctggcccaccaccaccaaagcccgcagagcggcataaggacgacagcaggggtcttgtgcttcctgggtacaagtacctcggacccttcaacggactcgacaagggggagccggtcaacgaggcagacgccgcggccctcgagcacgacaaggcctacgaccggcagctcgacagcggagacaacccgtacctcaagtacaaccacgccgacgcggagtttcaggagcgtcttaaagaagatacgtcttttgggggcaacctcggacgagcagtcttccaggcgaaaaagagggttcttgaacctctgggcctggttgaggaacctgttaagacggctccgggaaaaaagaggccggtagagcactctcctgcggagccagactcctcctcgggaaccggaaaagcgggccagcagcctgcaagaaaaagattgaattttggtcagactggagacgcagactccgtacctgacccccagcctctcggacagccaccagcagccccctctggtttgggatctactacaatggctacaggcagtggcgcaccaatggcagacaataacgagggtgccgatggagtgggtaattcctcaggaaattggcattgcgattcccaatggctgggcgacagagtcatcaccaccagcacccgaacctgggccctgcccacctacaacaaccacctctacaagcaaatctcaagccaatcaggagcctcaaacgacaaccactactttggctacagcaccccttgggggtattttgacttcaacagattccactgccacttttcaccacgtgactggcaaagactcatcaacaacaactggggattccgacccaagagactcaacttcaagctctttaacattcaagtcaaagaggtcacgcagaatgacggtacgacgacgattgccaataaccttaccagcacggttcaggtgtttactgactcggagtaccagctcccgtacgtcctcgggtcggcgcatcaaggatgcctcccgccgtttccagcggacgtcttcatggtcccacagtatggatacctcaccctgaacaacgggagtcaggcggtaggacgctcttccttttactgcctggagtactttccttctcagatgcttcgtactggaaacaactttcagttcagctacacctttgaagacgttcctttccacagcagctacgctcacagccagagtctggatcggctgatgaatcctctgatcgaccagtacctgtattatctgaacaaaacacaatcaaatagtggaactcttcagcagtctcggctactgtttagtcaagctggacccaccagcatgtctcttcaagctaaaaactggctacctggaccttgctacagacagcagcgtctgtcaaagcaggcaaacgacaacaacaacagcaactttccctggactgcggctacaaagtaccacctaaatggccgggactcgttggttaatccaggaccagctatggccagtcacaaagacgatgaagaaaagtttttccccatgcatggaaccctgatatttggtaaacaaggaacaaatgctaacgacgcggatttggacaatgtcatgattacagatgaagaagaaatccgcaccaccaatcccgtggctacggagcagtacggatatgtgtcaaataatttgcaaaactcaaatactggtccaactactggaactgtcaatcaccaaggagcgttacctggcatggtgtggcaggatcgagacgtgtacctgcagggacccatttgggccaagattcctcacaccgatggacactttcatccttctccactgatgggaggttttgggctcaaacacccgcctcctcagatcatgatcaaaaacactcccgttccagccaatcctcccacaaacttcagttctgccaagtttgcttctttcatcacacagtattccacggggcaggtcagcgtggagatcgagtgggagctgcagaaagagaacagcaaacgctggaatcccgaaattcagtacacttccaactacaacaaatctgttaatgtggactttactgtggacactaatggcgtgtattcagagcctcgccccattggcaccagatacctgactcgtaatctgtaa

SEQ ID NO: 322 - DNA, 2217 bp, Adeno-associated virus
atggctgctgacggttatcttccagattggctcgaggacaacctctctgagggcattcgcgagtggtgggacctgaaacctggagcccccaagcccaaggccaaccagcagaagcaggacgacggccggggtctggtgcttcctggctacaagtacctcggacccttcaacggactcgacaagggggagcccgtcaacgcggcggacgcagcggccctcgagcacgacaaggcctacgaccagcagctcaaagcgggtgacaatccgtacctgcggtataaccacgccgacgccgagtttcaggagcgtctgcaagaagatacgtcttttgggggcaacctcgggcgagcagtcttccaggccaagaagcgggttctcgaacctctcggtctggttgaggaagctgctaagacggctcctggaaagaagagaccggtagaaccgtcacctcagcgttcccccgactcctccacgggcatcggcaagaaaggccagcagcccgctaaaaagagactgaactttggtcagactggcgactcagagtcagtccccgaccctcaaccaatcggagaaccacctgcaggcccctctggtctgggatctggtacaatggctgcaggcggtggcgctccaatggcagacaataacgaaggcgccgacggagtgggtagttcctcaggaaattggcattgcgattccacatggctgggcgacagagtcatcaccaccagcacccgaacctgggccctgcccacctacaacaaccacctctacaagcaaatatccaatgggacatcgggagggagcaccaacgacaacacctacttcggctacagcaccccctgggggtattttgacttcaacagattccactgccacttctcaccacgtgactggcagcgactcatcaacaacaactggggattccggccaaaaagactcagcttcaagctcttcaacatccaggtcaaggaggtcacgcagaatgaaggcaccaagaccatcgccaataaccttaccagcacgattcaggtatttacggactcggaataccagctgccgtacgtcctcggctccgcgcaccagggctgcctgcctccgttcccggcggacgtcttcatgattccccagtacggctaccttacactgaacaatggaagtcaagccgtaggccgttcctccttctactgcctggaatattttccatctcaaatgctgcgaactggaaacaattttgaattcagctacaccttcgaggacgtgcctttccacagcagctacgcacacagccagagcttggaccgactgatgaatcctctcatcgaccagtacctgtactacttatccagaactcagtccacaggaggaactcaaggtacccagcaattgttattttctcaagctgggcctgcaaacatgtcggctcaggctaagaactggctacctggaccttgctaccggcagcagcgagtctctacgacactgtcgcaaaacaacaacagcaactttgcttggactggtgccaccaaatatcacctgaacggaagagactctttggtaaatcccggtgtcgccatggcaacccacaaggacgacgaggaacgcttcttcccgtcgagtggagtcctgatgtttggaaaacagggtgctggaagagacaatgtggactacagcagcgttatgctaaccagcgaagaagaaattaaaaccactaaccctgtagccacagaacaatacggtgtggtggctgacaacttgcagcaaaccaatacagggcctattgtgggaaatgtcaacagccaaggagccttacctggcatggtctggcagaaccgagacgtgtacctgcagggtcccatctgggccaagattcctcacacggacggcaactgccacccttcaccgctaatgggaggatttggactgaagcacccacctcctcagatcctgatcaagaacacgccggtacctgcggatcctccaacaacgttcagccaggcgaaattggcttccttcattacgcagtacagcaccggacaggtcagcgtggaaatcgagtgggagctgcagaaggagaacagcaaacgctggaacccagagattcagtacacttcaaactactacaaatctacaaatgtggactttgctgtcaatacagagggaacttattctgagcctcgccccattggtactcgttacctcacccgtaatctgtaa

SEQ ID NO: 323 - protein, 735 aa, Adeno-associated virus
MAADGYLPDWLEDTLSEGTRQWWKLKPGPPPPKPAERHKDDSRGLVLPGYKYLGPFNGLDKGEPVNEADAAALEHDKAYDRQLDSGDNPYLKYNHADAEFQERLKEDTSFGGNLGRAVFQAKKRVLEPLGLVEEPVKTAPGKKRPVEHSPAEPDSSSGTGKAGQQPARKRLNFGQTGDADSVPDPQPLGQPPAAPSGLGSTTMATGSGAPMADNNEGADGVGNSSGNWHCDSQWLGDRVITTSTRTWALPTYNNHLYKQISSQSGASNDNHYFGYSTPWGYFDFNRFHCHFSPRDWQRLINNNWGFRPKRLNFKLFNIQVKEVTQNDGTTTIANNLTSTVQVFTDSEYQLPYVLGSAHQGCLPPFPADVFMVPQYGYLTLNNGSQAVGRSSFYCLEYFPSQMLRTGNNFQFSYTFEDVPFHSSYAHSQSLDRLMNPLIDQYLYYLNKTQSNSGTLQQSRLLFSQAGPTSMSLQAKNWLPGPCYRQQRLSKQANDNNNSNFPWTAATKYHLNGRDSLVNPGPAMASHKDDEEKFFPMHGTLIFGKQGTNANDADLDNVMITDEEEIRTTNPVATEQYGYVSNNLQNSNTGPTTGTVNHQGALPGMVWQDRDVYLQGPIWAKIPHTDGHFHPSPLMGGFGLKHPPPQIMIKNTPVPANPPTNFSSAKFASFITQYSTGQVSVEIEWELQKENSKRWNPEIQYTSNYNKSVNVDFTVDTNGVYSEPRPIGTRYLTRNL

SEQ ID NO: 324 - DNA, 2208 bp, Adeno-associated virus
atggctgccgatggttatcttccagattggctcgaggacactctctctgaaggaataagacagtggtggaagctcaaacctggcccaccaccaccaaagcccgcagagcggcatcaggacaacagcaggggtcttgtgcttcctgggtacaagtacctcggaccctccaacggactcgacaaaggagagccggtcaacgaggcagacgccgcggccctcgagcacgacaaggcctacgaccggcagctcgacagcggagacaacccgtacctcaagtacaaccacgccgacgcggagtttcaggagcgtcttaaagaagatacgtcttttgggggcaacctcggacgagcagtcttccaggcgaaaaagagggttcttgaacctctgggcctggttgaggaacctgttaagacggctccgggaaaaaagaggccggtagagcactctcctgtggagccagactcctcctcgggaaccggaaaagcgggccatcagcctgcgagaaagagattgaattttggtcagactggagacgcagactccgtacctgacccccagcctctcggacagccaccagcagcccccacaagtttgggatctactacaatggctacaggcagtggcgcaccaatggcagacaataacgagggtgccgatggagtgggtaattcctcaggaaattggcattgcgattcccaatggctgggcgacagagtcatcaccaccagcacccgaacctgggccctgcccacctacaacaaccacctctacaagcaaatctccagccaatcaggagcctcgaacgacaaccactactttggctgcagcaccccctgggggtattttgacttcaacagattccactgtcacttctccccacgtgattggcaaagactcatcaacaacaactggggattccgacccaagagactcaacttcaagctctttaacattcaagtcaaagaggtcacgcagaatgacggtacgacgacgattgccaataaccttaccagcacggttcaggtgtttactgactcggagtacccgctcccgtacgtcctcggctcggcgcatcaaggatgcctcccgccgtttccagcggacgtcttcatggtcccacagtatggatacctcaccctgaacaacgggagtcaggcggtaggacgctcttccttttactgcctggagtactttccttctcagatgctgcgtaccggaaacaactttaccttcagctacacctttgaggacgttcctttccacagcagctacgctcacagccagagtttggaccggctgatgaatcctctgatcgaccagtatctatattatctgaacaggacacaatcaaatagtggaactcttcagcagtctaggctactgtttagccaagctggacccaccagcatgtctcttcaagctaaaaactggctgcctggaccttgctacagacagcagcgtctttcaaagcaggcaaacgacaacaacaacagcaactttccctggactgcggctacaaagtatcatctaaatggccgggactcgttggttaatccaggaccagctatggccagccacaaagacgatgaagaaaagtttttccccatgcatggaaccctgatatttggtaaacaaggaacaaatgctaacgacgcggatttggagcatgttatgattacagatgaagaagaaatcaggaccaccaatcctgtggctacagagcagtacggaaacgtgtcaaataatttgcaaaactcaaatactggtccaactacagaaaatgtcaatcaccagggagcgttacctggtatggtgtggcaggatcgagacgtgtacctgcagggacccatttgggccaagattcctcacaccgacggacactttcacccttctccactgatgggaggttttggactcaaacacccgcctcctcaaatcatgatcaaaaacactcccgttccagccaatcctcccacaaacttcagttctgccaagtttgcttctttcatcacacagtattccacgggccaggtcagcgtggagattgagtgggagctgcagaaggagaacagcaaacgctggaaccccgagatccagtatacttccaactacaacaaatctgttaatgtggactttactgtggacactaatggtgtgtattcagagccttgccccattggcaccagatacctgactcgtaatctgtaa

SEQ ID NO: 325 - protein, 735 aa, Adeno-associated virus
MAADGYLPDWLEDTLSEGIRQWWKLKPGPPPPKPAERHQDNSRGLVLPGYKYLGPSNGLDKGEPVNEADAAALEHDKAYDRQLDSGDNPYLKYNHADAEFQERLKEDTSFGGNLGRAVFQAKKRVLEPLGLVEEPVKTAPGKKRPVEHSPVEPDSSSGTGKAGHQPARKRLNFGQTGDADSVPDPQPLGQPPAAPTSLGSTTMATGSGAPMADNNEGADGVGNSSGNWHCDSQWLGDRVITTSTRTWALPTYNNHLYKQISSQSGASNDNHYFGCSTPWGYFDFNRFHCHFSPRDWQRLINNNWGFRPKRLNFKLFNIQVKEVTQNDGTTTIANNLTSTVQVFTDSEYPLPYVLGSAHQGCLPPFPADVFMVPQYGYLTLNNGSQAVGRSSFYCLEYFPSQMLRTGNNFTFSYTFEDVPFHSSYAHSQSLDRLMNPLIDQYLYYLNRTQSNSGTLQQSRLLFSQAGPTSMSLQAKNWLPGPCYRQQRLSKQANDNNNSNFPWTAATKYHLNGRDSLVNPGPAMASHKDDEEKFFPMHGTLIFGKQGTNANDADLEHVMITDEEEIRTTNPVATEQYGNVSNNLQNSNTGPTTENVNHQGALPGMVWQDRDVYLQGPIWAKIPHTDGHFHPSPLMGGFGLKHPPPQIMIKNTPVPANPPTNFSSAKFASFITQYSTGQVSVEIEWELQKENSKRWNPEIQYTSNYNKSVNVDFTVDTNGVYSEPCPIGTRYLTRNL

SEQ ID NO: 326 - DNA, 2214 bp, Artificial Sequence
  Description of Artificial Sequence: Synthetic polynucleotide
atggctgccgatggttatcttccagattggctcgaggacaaccttagtgaaggaattcgcgagtggtgggctttgaaacctggagcccctcaacccaaggcaaatcaacaacatcaagacaacgctcgaggtcttgtgcttccgggttacaaataccttggacccggcaacggactcgacaagggggagccggtcaacgcagcagacgcggcggccctcgagcacgacaaggcctacgaccagcagctgcaggcgggtgacaatccgtacctgcggtataaccacgccgacgccgagtttcaggagcgtctgcaagaagatacgtcttttgggggcaaccttggcagagcagtcttccaggccaaaaagaggatccttgagcctcttggtctggttgaggaagcagctaaaacggctcctggaaagaagaggcctgtagatcagtctcctcaggaaccggactcatcatctggtgttggcaaatcgggcaaacagcctgccagaaaaagactaaatttcggtcagactggcgactcagagtcagtcccagaccctcaacctctcggagaaccaccagcagcccccacaagtttgggatctaatacaatggcttcaggcggtggcgcaccaatggcagacaataacgagggtgccgatggggtgggtagttcctcgggaaattggcattgcgattcccaatggctgggggacagagtcatcaccaccagcacccgaacctgggccctgcccacctacaacaatcacctctacaagcaaatctccaacgggacatcgggaggagccaccaacgacaacacctacttcggctacagcaccccctgggggtattttgactttaacagattccactgccacttttcaccacgtgactggcagcgactcatcaacaacaactggggattccggcccaagagactcagcttcaagctcttcaacatccaggtcaaggaggtcacgcagaatgaaggcaccaagaccatcgccaataacctcaccagcaccatccaggtgtttacggactcggagtaccagctgccgtacgttctcggctctgcgcaccagggctgcctccctccgttcccggcggacgtgttcatgattccgcaatacggctacctgacgctcaacaatggcagccaagccgtgggacgttcatccttttactgcctggaatatttcccttctcagatgctgagaacgggcaacaactttaccttcagctacacctttgaggaagtgcctttccacagcagctacgcgcacagccagagcttggaccggctgatgaatcctctgattgaccagtacctgtactacttgtctcggactcaaacaacaggaggcacggcaaatacgcagactctgggcttcagccaaggtgggcctaatacaatggccaatcaggcaaagaactggctgccaggaccctgttaccgccaacaacgcgtctcaacgacaaccgggcaaaacaacaatagcaactttgcctggactgctgggaccaaataccatctgaatggaagaaattcattggctaatcctggcatcgctatggcaacacacaaagacgacgaggagcgtttttttcccagtaacgggatcctgatttttggcaaacaaaatgctgccagagacaatgcggattacagcgatgtcatgctcaccagcgaggaagaaatcaaaaccactaaccctgtggctacagaggaatacggtatcgtggcagataacttgcagcagcaaaacacggctcctcaaattggaactgtcaacagccagggggccttacccggtatggtctggcagaaccgggacgtgtacctgcagggtcccatctgggccaagattcctcacacggacggcaacttccacccgtctccgctgatgggcggctttggcctgaaacatcctccgcctcagatcctgatcaagaacacgcctgtacctgcggatcctccgaccaccttcaaccagtcaaagctgaactctttcatcacgcaatacagcaccggacaggtcagcgtggagatcgagtgggagctgcagaaggaaaacagcaagcgctggaacccggagatccagtacacttccaactattacaagtctaataatgttgaatttgctgttaatactgaaggtgtatatagtgaaccccgccccattggcaccagatacctgactcgtaatctgtaa

SEQ ID NO: 327 - protein, 737 aa, Artificial Sequence
  Description of Artificial Sequence: Synthetic polypeptide
MAADGYLPDWLEDNLSEGIREWWALKPGAPQPKANQQHQDNARGLVLPGYKYLGPGNGLDKGEPVNAADAAALEHDKAYDQQLQAGDNPYLRYNHADAEFQERLQEDTSFGGNLGRAVFQAKKRILEPLGLVEEAAKTAPGKKRPVDQSPQEPDSSSGVGKSGKQPARKRLNFGQTGDSESVPDPQPLGEPPAAPTSLGSNTMASGGGAPMADNNEGADGVGSSSGNWHCDSQWLGDRVITTSTRTWALPTYNNHLYKQISNGTSGGATNDNTYFGYSTPWGYFDFNRFHCHFSPRDWQRLINNNWGFRPKRLSFKLFNIQVKEVTQNEGTKTIANNLTSTIQVFTDSEYQLPYVLGSAHQGCLPPFPADVFMIPQYGYLTLNNGSQAVGRSSFYCLEYFPSQMLRTGNNFTFSYTFEEVPFHSSYAHSQSLDRLMNPLIDQYLYYLSRTQTTGGTANTQTLGFSQGGPNTMANQAKNWLPGPCYRQQRVSTTTGQNNNSNFAWTAGTKYHLNGRNSLANPGIAMATHKDDEERFFPSNGILIFGKQNAARDNADYSDVMLTSEEEIKTTNPVATEEYGIVADNLQQQNTAPQIGTVNSQGALPGMVWQNRDVYLQGPIWAKIPHTDGNFHPSPLMGGFGLKHPPPQILIKNTPVPADPPTTFNQSKLNSFITQYSTGQVSVEIEWELQKENSKRWNPEIQYTSNYYKSNNVEFAVNTEGVYSEPRPIGTRYLTRNL

SEQ ID NO: 328 - DNA, 2211 bp, Artificial Sequence
  Description of Artificial Sequence: Synthetic polynucleotide
atggctgccgatggttatcttccagattggctcgaggacaacctctctgagggcattcgcgagtggtgggacttgaaacctggagccccgaagcccaaagccaaccagcaaaagcaggacgacggccggggtctggtgcttcctggctacaagtacctcggacccttcaacggactcgacaagggggagcccgtcaacgcggcggacgcagcggccctcgagcacgacaaggcctacgaccagcagctcaaagcgggtgacaatccgtacctgcggtataaccacgccgacgccgagtttcaggagcgtctgcaagaagatacgtcttttgggggcaacctcgggcgagcagtcttccaggccaagaagcgggttctcgaacctctcggtctggttgaggaaggcgctaagacggctcctggaaagaaacgtccggtagagcagtcgccacaagagccagactcctcctcgggcatcggcaagacaggccagcagcccgctaaaaagagactcaattttggtcagactggcgactcagagtcagtccccgacccacaacctctcggagaacctccagcaacccccgctgctgtgggacctactacaatggcttcaggcggtggcgcaccaatggcagacaataacgaaggcgccgacggagtgggtaatgcctcaggaaattggcattgcgattccacatggctgggcgacagagtcatcaccaccagcacccgaacatgggccttgcccacctataacaaccacctctacaagcaaatctccagtgcttcaacgggggccagcaacgacaaccactacttcggctacagcaccccctgggggtattttgatttcaacagattccactgccatttctcaccacgtgactggcagcgactcatcaacaacaattggggattccggcccaagagactcaacttcaagctcttcaacatccaagtcaaggaggtcacgacgaatgatggcgtcacgaccatcgctaataaccttaccagcacggttcaagtcttctcggactcggagtaccagctgccgtacgttctcggctctgcccaccagggctgcctgcctccgttcccggcggacgtgttcatgattccccagtacggctacctaacactcaacaacggtagtcaggccgtgggacgctcctccttctactgcctggaatactttccttcgcagatgctgagaaccggcaacaacttccagtttacttacaccttcgaggacgtgcctttccacagcagctacgcccacagccagagcttggaccggctgatgaatcctctgattgaccagtacctgtactacttgtctcggactcaaacaacaggaggcacggcaaatacgcagactctgggcttcagccaaggtgggcctaatacaatggccaatcaggcaaagaactggctgccaggaccctgttaccgccaacaacgcgtctcaacgacaaccgggcaaaacaacaatagcaattttacctggactggtgcttcaaaatataacctcaatgggcgtgaatccatcatcaaccctggcactgctatggcctcacacaaagacgacgaagacaagttctttcccatgagcggtgtcatgatttttggaaaagagagcgccggagcttcaaacactgcattggacaatgtcatgattacagacgaagaggaaattaaagccactaaccctgtggccaccgaaagatttgggaccgtggcagtcaatttccagagcagcagcacagaccctgcgaccggagatgtgcatgctatgggagcattacctggcatggtgtggcaagatagagacgtgtacctgcagggtcccatttgggccaaaattcctcacacagatggacactttcacccgtctcctcttatgggcggctttggactcaagaacccgcctcctcagatcctcatcaaaaacacgcctgttcctgcgaatcctccggcggagttttcagctacaaagtttgcttcattcatcacccaatactccacaggacaagtgagtgtggaaattgaatgggagctgcagaaagaaaacagcaagcgctggaatcccgaagtgcagtacacatccaattatgcaaaatctgccaacgttgattttactgtggacaacaatggactttatactgagcctcgccccattggcacccgttacctcacccgtcccctgtaa

SEQ ID NO: 329 - protein, 736 aa, Artificial Sequence
  Description of Artificial Sequence: Synthetic polypeptide
MAADGYLPDWLEDNLSEGIREWWDLKPGAPKPKANQQKQDDGRGLVLPGYKYLGPFNGLDKGEPVNAADAAALEHDKAYDQQLKAGDNPYLRYNHADAEFQERLQEDTSFGGNLGRAVFQAKKRVLEPLGLVEEGAKTAPGKKRPVEQSPQEPDSSSGIGKTGQQPAKKRLNFGQTGDSESVPDPQPLGEPPATPAAVGPTTMASGGGAPMADNNEGADGVGNASGNWHCDSTWLGDRVITTSTRTWALPTYNNHLYKQISSASTGASNDNHYFGYSTPWGYFDFNRFHCHFSPRDWQRLINNNWGFRPKRLNFKLFNIQVKEVTTNDGVTTIANNLTSTVQVFSDSEYQLPYVLGSAHQGCLPPFPADVFMIPQYGYLTLNNGSQAVGRSSFYCLEYFPSQMLRTGNNFQFTYTFEDVPFHSSYAHSQSLDRLMNPLIDQYLYYLSRTQTTGGTANTQTLGFSQGGPNTMANQAKNWLPGPCYRQQRVSTTTGQNNNSNFTWTGASKYNLNGRESIINPGTAMASHKDDEDKFFPMSGVMIFGKESAGASNTALDNVMITDEEEIKATNPVATERFGTVAVNFQSSSTDPATGDVHAMGALPGMVWQDRDVYLQGPIWAKIPHTDGHFHPSPLMGGFGLKNPPPQILIKNTPVPANPPAEFSATKFASFITQYSTGQVSVEIEWELQKENSKRWNPEVQYTSNYAKSANVDFTVDNNGLYTEPRPIGTRYLTRPL

SEQ ID NO: 330 - DNA, 2211 bp, Artificial Sequence
  Description of Artificial Sequence: Synthetic polynucleotide
atggctgctgacggttatcttccagattggctcgaggacaacctttctgaaggcattcgagagtggtgggcgctgcaacctggagcccctaaacccaaggcaaatcaacaacatcaggacaacgctcggggtcttgtgcttccgggttacaaatacctcggacccggcaacggactcgacaagggggaacccgtcaacgcagcggacgcggcagccctcgagcacgacaaggcctacgaccagcagctcaaggccggtgacaacccctacctcaagtacaaccacgccgacgccgagttccaggagcggctcaaagaagatacgtcttttgggggcaacctcgggcgagcagtcttccaggccaaaaagaggcttcttgaacctcttggtctggttgaggaagcggctaagacggctcctggaaagaagaggcctgtagatcagtctcctcaggaaccggactcatcatctggtgttggcaaatcgggcaaacagcctgccagaaaaagactaaatttcggtcagactggcgactcagagtcagtcccagaccctcaacctctcggagaaccaccagcagcccccacaagtttgggatctaatacaatggcttcaggcggtggcgcaccaatggcagacaataacgagggtgccgatggagtgggtaattcctcaggaaattggcattgcgattcccaatggctgggcgacagagtcatcaccaccagcaccagaacctgggccctgcccacttacaacaaccatctctacaagcaaatctccagccaatcaggagcttcaaacgacaaccactactttggctacagcaccccttgggggtattttgactttaacagattccactgccacttctcaccacgtgactggcagcgactcattaacaacaactggggattccggcccaagaaactcagcttcaagctcttcaacatccaagttaaagaggtcacgcagaacgatggcacgacgactattgccaataaccttaccagcacggttcaagtgtttacggactcggagtatcagctcccgtacgtgctcgggtcggcgcaccaaggctgtctcccgccgtttccagcggacgtcttcatggtccctcagtatggatacctcaccctgaacaacggaagtcaagcggtgggacgctcatccttttactgcctggagtacttcccttcgcagatgctaaggactggaaataacttccaattcagctataccttcgaggatgtaccttttcacagcagctacgctcacagccagagtttggatcgcttgatgaatcctcttattgatcagtatctgtactacctgaacagaacgcaaggaacaacctctggaacaaccaaccaatcacggctgctttttagccaggctgggcctcagtctatgtctttgcaggccagaaattggctacctgggccctgctaccggcaacagagactttcaaagactgctaacgacaacaacaacagtaactttccttggacagcggccagcaaatatcatctcaatggccgcgactcgctggtgaatccaggaccagctatggccagtcacaaggacgatgaagaaaaatttttccctatgcacggcaatctaatatttggcaaagaagggacaacggcaagtaacgcagaattagataatgtaatgattacggatgaagaagagattcgtaccaccaatcctgtggcaacagagcagtatggaactgtggcaaataacttgcagagctcaaatacagctcccacgactagaactgtcaatgatcagggggccttacctggcatggtgtggcaagatcgtgacgtgtaccttcaaggacctatctgggcaaagattcctcacacggatggacactttcatccttctcctctgatgggaggctttggactgaaacatccgcctcctcaaatcatgatcaaaaatactccggtaccggcaaatcctccgacgactttcagcccggccaagtttgcttcatttatcactcagtactccactggacaggtcagcgtggaaattgagtgggagctacagaaagaaaacagcaaacgttggaatccagagattcagtacacttccaactacaacaagtctgttaatgtggactttactgtagacactaatggtgtttatagtgaacctcgccccattggcacccgttaccttacccgtcccctgtaa

SEQ ID NO: 331 - protein, 736 aa, Artificial Sequence
  Description of Artificial Sequence: Synthetic polypeptide
MAADGYLPDWLEDNLSEGIREWWALQPGAPKPKANQQHQDNARGLVLPGYKYLGPGNGLDKGEPVNAADAAALEHDKAYDQQLKAGDNPYLKYNHADAEFQERLKEDTSFGGNLGRAVFQAKKRLLEPLGLVEEAAKTAPGKKRPVDQSPQEPDSSSGVGKSGKQPARKRLNFGQTGDSESVPDPQPLGEPPAAPTSLGSNTMASGGGAPMADNNEGADGVGNSSGNWHCDSQWLGDRVITTSTRTWALPTYNNHLYKQISSQSGASNDNHYFGYSTPWGYFDFNRFHCHFSPRDWQRLINNNWGFRPKKLSFKLFNIQVKEVTQNDGTTTIANNLTSTVQVFTDSEYQLPYVLGSAHQGCLPPFPADVFMVPQYGYLTLNNGSQAVGRSSFYCLEYFPSQMLRTGNNFQFSYTFEDVPFHSSYAHSQSLDRLMNPLIDQYLYYLNRTQGTTSGTTNQSRLLFSQAGPQSMSLQARNWLPGPCYRQQRLSKTANDNNNSNFPWTAASKYHLNGRDSLVNPGPAMASHKDDEEKFFPMHGNLIFGKEGTTASNAELDNVMITDEEEIRTTNPVATEQYGTVANNLQSSNTAPTTRTVNDQGALPGMVWQDRDVYLQGPIWAKIPHTDGHFHPSPLMGGFGLKHPPPQIMIKNTPVPANPPTTFSPAKFASFITQYSTGQVSVEIEWELQKENSKRWNPEIQYTSNYNKSVNVDFTVDTNGVYSEPRPIGTRYLTRPL

SEQ ID NO: 332 - DNA, 2211 bp, Artificial Sequence
  Description of Artificial Sequence: Synthetic polynucleotide
atggctgccgatggttatcttccagattggctcgaggacaaccttagtgaaggaattcgcgagtggtgggctttgaaacctggagcccctcaacccaaggcaaatcaacaacatcaagacaacgctcgaggtcttgtgcttccgggttacaaataccttggacccggcaacggactcgacaagggggagccggtcaacgcagcagacgcggcggccctcgagcacgacaaggcctacgaccagcagctcaaggccggagacaacccgtacctcaagtacaaccacgccgacgccgagttccaggagcggctcaaagaagatacgtcttttgggggcaacctcgggcgagcagtcttccaggccaaaaagaggcttcttgaacctcttggtctggttgaggaagcggctaagacggctcctggaaagaagagaccggtagagccatcaccccagcgttctccagactcctctacgggcatcggcaagaaaggccaacagcccgctaaaaagagactcaattttggtcagactggcgactcagagtcagtccccgacccacaacctctcggagaacctccagcaacccccgctgctgtgggacctactacaatggcttcaggcggtggcgcaccaatggcagacaataacgagggtgccgatggagtgggtaattcctcaggaaattggcattgcgattcccaatggctgggcgacagagtcatcaccaccagcaccagaacctgggccctgcccacttacaacaaccatctctacaagcaaatctccagccaatcaggagcttcaaacgacaaccactactttggctacagcaccccttgggggtattttgactttaacagattccactgccacttttcaccacgtgactggcaaagactcatcaacaacaactggggattccgacccaagagactcaacttcaagctcttcaacatccaagtcaaggaggtcacgacgaatgatggcgtcacgaccatcgctaataaccttaccagcacggttcaagtcttctcggactcggagtaccagttgccgtacgtcctcggctctgcgcaccagggctgcctccctccgttcccggcggacgtgttcatgattccgcagtacggctacctaacgctcaacaatggcagccaagccgtgggacgttcatccttttactgcctggaatatttcccttctcagatgctgagaacgggcaacaactttaccttcagctacacttttgaggacgttcctttccacagcagctacgctcacagccagagtctggaccgtctcatgaatcctctcatcgaccagtacctgtattacttgagcagaacaaacactccaagtggaaccaccacgcagtcaaggcttcagttttctcaggccggagcgagtgacattcgggaccagtctaggaactggcttcctggaccctgttaccgccagcagcgcgtttctaaaacaaaaacagacaacaacaacagcaattttacctggactggtgcttcaaaatataaccttaatgggcgtgaatctataatcaaccctggcactgctatggcctcacacaaagacgacgaagacaagttctttcccatgagcggtgtcatgatttttggaaaagagagcgccggagcttcaaacactgcattggacaatgtcatgattacagacgaagaggaaattaaagccactaaccctgtggccaccgaaagatttgggaccgtggcagtcaatttccagagcagcagcacagaccctgcgaccggagatgtgcatgttatgggagccttacctggaatggtgtggcaagacagagacgtatacctgcagggtcctatttgggccaaaattcctcacacggatggacactttcacccgtctcctcttatgggcggctttggactcaagaacccgcctcctcagatcctcatcaaaaacacgcctgttcctgcgaatcctccggcggagttttcagctacaaagtttgcttcattcatcacccaatactccacaggacaagtgagtgtggaaattgaatgggagctgcagaaagaaaacagcaagcgctggaatcccgaagtgcagtacacatccaattatgcaaaatctgccaacgttgattttactgtggacaacaatggactttatactgagcctcgccccattggcacccgttaccttacccgtcccctgtaa

SEQ ID NO: 333 - protein, 736 aa, Artificial Sequence
  Description of Artificial Sequence: Synthetic polypeptide
MAADGYLPDWLEDNLSEGIREWWALKPGAPQPKANQQHQDNARGLVLPGYKYLGPGNGLDKGEPVNAADAAALEHDKAYDQQLKAGDNPYLKYNHADAEFQERLKEDTSFGGNLGRAVFQAKKRLLEPLGLVEEAAKTAPGKKRPVEPSPQRSPDSSTGIGKKGQQPAKKRLNFGQTGDSESVPDPQPLGEPPATPAAVGPTTMASGGGAPMADNNEGADGVGNSSGNWHCDSQWLGDRVITTSTRTWALPTYNNHLYKQISSQSGASNDNHYFGYSTPWGYFDFNRFHCHFSPRDWQRLINNNWGFRPKRLNFKLFNIQVKEVTTNDGVTTIANNLTSTVQVFSDSEYQLPYVLGSAHQGCLPPFPADVFMIPQYGYLTLNNGSQAVGRSSFYCLEYFPSQMLRTGNNFTFSYTFEDVPFHSSYAHSQSLDRLMNPLIDQYLYYLSRTNTPSGTTTQSRLQFSQAGASDIRDQSRNWLPGPCYRQQRVSKTKTDNNNSNFTWTGASKYNLNGRESIINPGTAMASHKDDEDKFFPMSGVMIFGKESAGASNTALDNVMITDEEEIKATNPVATERFGTVAVNFQSSSTDPATGDVHVMGALPGMVWQDRDVYLQGPIWAKIPHTDGHFHPSPLMGGFGLKNPPPQILIKNTPVPANPPAEFSATKFASFITQYSTGQVSVEIEWELQKENSKRWNPEVQYTSNYAKSANVDFTVDNNGLYTEPRPIGTRYLTRPL

SEQ ID NO: 334 - DNA, 2211 bp, Artificial Sequence
  Description of Artificial Sequence: Synthetic polynucleotide
atggctgccgatggttatcttccagattggctcgaggacaacctctctgagggcattcgcgagtggtgggacttgaaacctggagcccctaaacccaaggcaaatcaacaacatcaggacaacgctcgaggtcttgtgcttccgggttacaaataccttggacccggcaacggactcgacaagggggagccggtcaacgcagcagacgcggcggccctcgagcacgacaaggcctacgaccagcagctcaaggccggagacaacccgtacctcaagtacaaccacgccgacgccgagttccaggagcggctcaaagaagatacgtcttttgggggcaacctcgggcgagcagtcttccaggccaaaaagaggcttcttgaacctcttggtctggttgaggaagcggctaagacggctcctggaaagaagagaccggtagagccatcaccccagcgttctccagactcctctacgggcatcggcaagaaaggccaacagcccgctaaaaagagactcaattttggtcagactggcgactcagagtcagtccccgacccacaacctctcggagaacctccagcaacccccgctgctgtgggacctactacaatggcttcaggcggtggcgcaccaatggcagacaataacgagggtgccgatggagtgggtaattcctcaggaaattggcattgcgattcccaatggctgggcgacagagtcatcaccaccagcaccagaacctgggccctgcccacttacaacaaccatctctacaagcaaatctccagccaatcaggagcttcaaacgacaaccactactttggctacagcaccccttgggggtattttgactttaacagattccactgccacttttcaccacgtgactggcaaagactcatcaacaacaactggggattccgacccaagagactcaacttcaagctcttcaacatccaagtcaaggaggtcacgacgaatgatggcgtcacgaccatcgctaataaccttaccagcacggttcaagtcttctcggactcggagtaccagttgccgtacgtcctcggctctgcgcaccagggctgcctccctccgttcccggcggacgtgttcatgattccgcagtacggctacctaacgctcaacaatggcagccaagccgtgggacgttcatccttttactgcctggaatatttcccttctcagatgctgagaacgggcaacaactttaccttcagctacacttttgaggacgttcctttccacagcagctacgctcacagccagagtctggaccgtctcatgaatcccctcatcgaccagtacctgtattacttgagcagaacaaacactccaagtggaaccaccacgcagtcaaggcttcagttttctcaggccggagcgagtgacattcgggaccagtctaggaactggcttcctggaccctgttaccggcagcagcgcgtttctaaaacaaaaacagacaacaacaacagcaactttacctggactggtgcttcaaaatataaccttaatgggcgtgaatctataatcaaccctggcactgctatggcctcacacaaagacgacgaagacaagttctttcccatgagcggtgtcatgatttttggaaaggagagcgccggagcttcaaacactgcattggacaatgtcatgatcacagacgaagaggaaatcaaagccactaaccccgtggccaccgaaagatttgggactgtggcagtcaatctccagagcagcagcacagaccctgcgaccggagatgtgcatgttatgggagccttacctggaatggtgtggcaagacagagacgtgtacctgcagggtcctatttgggccaaaattcctcacacggatggacactttcacccgtctcctctcatgggcggctttggacttaagcacccgcctcctcagatcctcatcaaaaacacgcctgttcctgcgaatcctccggcagagttttcggctacaaagtttgcttcattcatcacccagtattccacaggacaagtgagtgtggaaattgaatgggagctgcagaaagaaaacagcaagcgctggaatcccgaagtgcagtacacatccaattatgcaaaatctgccaacgttgattttactgtggacaacaatggactttatactgagcctcgccccattggcacccgttacctcacccgtcccctgtaa

SEQ ID NO: 335 - protein, 736 aa, Artificial Sequence
  Description of Artificial Sequence: Synthetic polypeptide
MAADGYLPDWLEDNLSEGIREWWDLKPGAPKPKANQQHQDNARGLVLPGYKYLGPGNGLDKGEPVNAADAAALEHDKAYDQQLKAGDNPYLKYNHADAEFQERLKEDTSFGGNLGRAVFQAKKRLLEPLGLVEEAAKTAPGKKRPVEPSPQRSPDSSTGIGKKGQQPAKKRLNFGQTGDSESVPDPQPLGEPPATPAAVGPTTMASGGGAPMADNNEGADGVGNSSGNWHCDSQWLGDRVITTSTRTWALPTYNNHLYKQISSQSGASNDNHYFGYSTPWGYFDFNRFHCHFSPRDWQRLINNNWGFRPKRLNFKLFNIQVKEVTTNDGVTTIANNLTSTVQVFSDSEYQLPYVLGSAHQGCLPPFPADVFMIPQYGYLTLNNGSQAVGRSSFYCLEYFPSQMLRTGNNFTFSYTFEDVPFHSSYAHSQSLDRLMNPLIDQYLYYLSRTNTPSGTTTQSRLQFSQAGASDIRDQSRNWLPGPCYRQQRVSKTKTDNNNSNFTWTGASKYNLNGRESIINPGTAMASHKDDEDKFFPMSGVMIFGKESAGASNTALDNVMITDEEEIKATNPVATERFGTVAVNLQSSSTDPATGDVHVMGALPGMVWQDRDVYLQGPIWAKIPHTDGHFHPSPLMGGFGLKHPPPQILIKNTPVPANPPAEFSATKFASFITQYSTGQVSVEIEWELQKENSKRWNPEVQYTSNYAKSANVDFTVDNNGLYTEPRPIGTRYLTRPL

SEQ ID NO: 336 - DNA, 2214 bp, Artificial Sequence
  Description of Artificial Sequence: Synthetic polynucleotide
atggctgccgatggttatcttccagattggctcgaggacaaccttagtgaaggaattcgcgagtggtgggctttgaaacctggagcccctcaacccaaggcaaatcaacaacatcaagacaacgctcgaggtcttgtgcttccgggttacaaataccttggacccggcaacggactcgacaagggggagccggtcaacgcagcagacgcggcggccctcgagcacgacaaggcctacgaccagcagctgcaggcgggtgacaatccgtacctgcggtataaccacgccgacgccgagtttcaggagcgtctgcaagaagatacgtcttttgggggcaaccttggcagagcagtcttccaggccaaaaagaggatccttgagcctcttggtctggttgaggaagcagctaaaacggctcctggaaagaagaggcctgtagatcagtctcctcaggaaccggactcatcatctggtgttggcaaatcgggcaaacagcctgccagaaaaagactaaatttcggtcagactggcgactcagagtcagtcccagaccctcaacctctcggagaaccaccagcagcccccacaagtttgggatctaatacaatggcttcaggcggtggcgcaccaatggcagacaataacgagggtgccgatggggtgggtagttcctcgggaaattggcattgcgattcccaatgactgggggacagagtcatcaccaccagcacccgaacctgggccctgcccacctacaacaatcacctctacaagcaaatctccaacgggacatcgggaggagccaccaacgacaacacctacttcggctacagcaccccctgggggtattttgactttaacagattccactgccacttttcaccacgtgactggcagcgactcatcaacaacaactggggattccggcccaagagactcagcttcaagctcttcaacatccaggtcaaggaggtcacgcagaatgaaggcaccaagaccatcgccaataacctcaccagcaccatccaggtgtttacggactcggagtaccagctgccgtacgttctcggctctgcgcaccagggctgcctccctccgttcccggcggacgtgttcatgattccgcaatacggctacctgacgctcaacaatggcagccaagccgtgggacgttcatccttttactgcctggaatatttcccttctcagatgctgagaacgggcaacaactttaccttcagctacacctttgaggaagtgcctttccacagcagctacgcgcacagccagagcttggaccggctgatgaatcctctgattgaccagtacctgtactacttgtctcggactcaaacaacaggaggcacggcaaatacgcagactctgggcttcagccaaggtgggcctaatacaatggccaatcaggcaaagaactggctgccaggaccctgttaccgccaacaacgcgtctcaacgacaaccgggcaaaacaacaatagcaactttgcctggactgctgggaccaaataccatctgaatggaagaaattcattggctaatcctggcatcgctatggcaacacacaaagacgacgaggagcgtttttttcccagtaacgggatcctgatttttggcaaacaaaatgctgccagagacaatgcggattacagcgatgtcatgctcaccagcgaggaagaaatcaaaaccactaaccctgtggctacagaggaatacggtatcgtggcagataacttgcagcagcaaaacacggctcctcaaattggaactgtcaacagccagggggccttacccggtatggtctggcagaaccgggacgtgtacctgcagggtcccatctgggccaagattcctcacacggacggcaacttccacccgtctccgctgatgggcggctttggcctgaaacatcctccgcctcagatcctgatcaagaacacgcctgtacctgcggatcctccgaccaccttcaaccagtcaaagctgaactctttcatcacgcaatacagcaccggacaggtcagcgtggagatcgagtgggagctgcagaaggaaaacagcaagcgctggaacccggagatccagtacacttccaactattacaagtctaataatgttgaatttgctgttaatactgaaggtgtatatagtgaaccccgccccattggcaccagatacctgactcgtaatctgtaa

SEQ ID NO: 337 - protein, 736 aa, Artificial Sequence
  Description of Artificial Sequence: Synthetic polypeptide
MAADGYLPDWLEDNLSEGIREWWALKPGAPQPKANQQHQDNARGLVLPGYKYLGPGNGLDKGEPVNAADAAALEHDKAYDQQLQAGDNPYLRYNHADAEFQERLQEDTSFGGNLGRAVFQAKKRILEPLGLVEEAAKTAPGKKRPVDQSPQEPDSSSGVGKSGKQPARKRLNFGQTGDSESVPDPQPLGEPPAAPTSLGSNTMASGGGAPMADNNEGADGVGSSSGNWHCDSQLGDRVITTSTRTWALPTYNNHLYKQISNGTSGGATNDNTYFGYSTPWGYFDFNRFHCHFSPRDWQRLINNNWGFRPKRLSFKLFNIQVKEVTQNEGTKTIANNLTSTIQVFTDSEYQLPYVLGSAHQGCLPPFPADVFMIPQYGYLTLNNGSQAVGRSSFYCLEYFPSQMLRTGNNFTFSYTFEEVPFHSSYAHSQSLDRLMNPLIDQYLYYLSRTQTTGGTANTQTLGFSQGGPNTMANQAKNWLPGPCYRQQRVSTTTGQNNNSNFAWTAGTKYHLNGRNSLANPGIAMATHKDDEERFFPSNGILIFGKQNAARDNADYSDVMLTSEEEIKTTNPVATEEYGIVADNLQQQNTAPQIGTVNSQGALPGMVWQNRDVYLQGPIWAKIPHTDGNFHPSPLMGGFGLKHPPPQILIKNTPVPADPPTTFNQSKLNSFITQYSTGQVSVEIEWELQKENSKRWNPEIQYTSNYYKSNNVEFAVNTEGVYSEPRPIGTRYLTRNL

SEQ ID NO: 338 - DNA, 2214 bp, Artificial Sequence
  Description of Artificial Sequence: Synthetic polynucleotide
atggctgccgatggttatcttccagattggctcgaggacaaccttagtgaaggaattcgcgagtggtgggctttgaaacctggagcccctcaacccaaggcaaatcaacaacatcaagacaacgctcgaggtcttgtgcttccgggttacaaataccttggacccggcaacggactcgacaagggggagccggtcaacgcagcagacgcggcggccctcgagcacgacaaggcctacgaccagcagctgcaggcgggtgacaatccgtacctgcggtataaccacgccgacgccgagtttcaggagcgtctgcaagaagatacgtcttttgggggcaaccttggcagagcagtcttccaggccaaaaagaggatccttgagcctcttggtctggttgaggaagcagctaaaacggctcctggaaagaagaggcctgtagatcagtctcctcaggaaccggactcatcatctggtgttggcaaatcgggcaaacagcctgccagaaaaagactaaatttcggtcagactggcgactcagagtcagtcccagaccctcaacctctcggagaaccaccagcagcccccacaagtttgggatctaatacaatggcttcaggcggtggcgcaccaatggcagacaataacgagggtgccgatggggtgggtagttcctcgggaaattggcattgcgattcccaatggctgggggacagagtcatcaccaccagcacccgaacctgggccctgcccacctacaacaatcacctctacaagcaaatctccaacgggacatcgggaggagccaccaacgacaacacctacttcggctacagcaccccctgggggtattttgactttaacagattccactgccacttttcaccacgtgactggcagcgactcatcaacaacaactggggattccggcccaagagactcagcttcaagctcttcaacatccaggtcaaggaggtcacgcagaatgaaggcaccaagaccatcgccaataacctcaccagcaccatccaggtgtttacggactcggagtaccagctgccgtacgttctcggctctgcgcaccagggctgcctccctccgttcccggcggacgtgttcatgattccgcaatacggctacctgacgctcaacaatggcagccaagccgtgggacgttcatccttttactgcctggaatatttcccttctcagatgctgagaacgggcaacaactttaccttcagctacacctttgaggaagtgccttttcacagcagctacgcgcacagccagagcttggaccggctgatgaatcctctgattgaccagtacctgtactacttgtctcggactcaaacaacaggaggcacggcaaatacgcagactctgggcttcagccaaggtgggcctaatacaatggccaatcaggcaaagaactggctgccaggaccctgttaccgccaacaacgcgtctcaacgacaaccgggcaaaacaacaatagcaactttgcctggactgctgggaccaaataccatctgaatggaagaaattcattggctaatcctggcatcgctatggcaacacacaaagacgacgaggagcgtttttttcccagtaacgggatcctgatttttggcaaacaaaatgctgccagagacaatgcggattacagcgatgtcatgctcaccagcgaggaagaaatcaaaaccactaaccctgtggctacagaggaatacggtatcgtggcagataacttgcagcagcaaaacacggctcctcaaattggaactgtcaacagccagggggccttacccggtatggtctggcagaaccgggacgtgtacctgcagggtcccatctgggccaagattcctcacacggacggcaacttccacccgtctccgctgatgggcggctttggcctgaaacatcctccgcctcagatcctgatcaagaacacgcctgtacctgcggatcctccgaccaccttcaaccagtcaaagctgaactctttcatcacgcaatacagcaccggacaggtcagcgtggagatcgagtgggagctgcagaaggaaaacagcaagcgctggaacccggagatccagtacacttccaactattacaagtctaataatgttgaatttgctgttaatactgaaggtgtatatagtgaaccccgccccattggcaccagatacctgactcgtaatctgtaa

SEQ ID NO: 339 - protein, 737 aa, Artificial Sequence; identical to SEQ ID NO: 327
  Description of Artificial Sequence: Synthetic polypeptide

SEQ ID NO: 340 - DNA, 2211 bp, Artificial Sequence
  Description of Artificial Sequence: Synthetic polynucleotide
atggctgccgatggttatcttccagattggctcgaggacaacctctctgagggcattcgcgagtggtgggacttgaaacctggagcccctaaacccaaggcaaatcaacaacatcaggacaacgctcgaggtcttgtgcttccgggttacaaataccttggacccggcaacggactcgacaagggggagccggtcaacgcagcagacgcggcggccctcgagcacgacaaggcctacgaccagcagctcaaggccggagacaacccgtacctcaagtacaaccacgccgacgccgagttccaggagcggctcaaagaagatacgtcttttgggggcaacctcgggcgagcagtcttccaggccaaaaagaggcttcttgaacctcttggtctggttgaggaagcggctaagacggctcctggaaagaagagaccggtagagccatcaccccagcgttctccagactcctctacgggcatcggcaagaaaggccaacagcccgctaaaaagagactcaattttggtcagactggcgactcagagtcagtccccgacccacaacctctcggagaacctccagcaacccccgctgctgtgggacctactacaatggcttcaggcggtggcgcaccaatggcagacaataacgagggtgccgatggagtgggtaattcctcaggaaattggcattgcgattcccaatggctgggcgacagagtcatcaccaccagcaccagaacctgggccctgcccacttacaacaaccatctctacaagcaaatctccagccaatcaggagcttcaaacgacaaccactactttggctacagcaccccttgggggtattttgactttaacagattccactgccacttttcaccacgtgactggcaaagactcatcaacaacaactggggattccgacccaagagactcaacttcaagctcttcaacatccaagtcaaggaggtcacgacgaatgatggcgtcacgaccatcgctaataaccttaccagcacggttcaagtcttctcggactcggagtaccagttgccgtacgtcctcggctctgcgcaccagggctgcctccctccgttcccggcggacgtgttcatgattccgcagtacggctacctaacgctcaacaatggcagccaagccgtgggacgttcatccttttactgcctggaatatttcccttctcagatgctgagaacgggcaacaactttaccttcagctacacttttgaggacgttcctttccacagcagctacgctcacagccagagtctggaccgtctcatgaatcctctcatcgaccagtacctgtattacttgagcagaacaaacactccaagtggaaccaccacgcagtcaaggcttcagttttctcaggccggagcgagtgacattcgggaccagtctaggaactggcttcctggaccctgttaccgccagcagcgcgtttctaaaacaaaaacagacaacaacaacagcaattttacctggactggtgcttcaaaatataaccttaatgggcgtgaatctataatcaaccctggcactgctatggcctcacacaaagacgacgaagacaagttctttcccatgagcggtgtcatgatttttggaaaagagagcgccggagcttcaaacactgcattggacaatgtcatgattacagacgaagaggaaattaaagccactaaccctgtggccaccgaaagatttgggaccgtggcagtcaatttccagagcagcagcacagaccctgcgaccggagatgtgcatgctatgggagcattacctggcatggtgtggcaagatagagacgtgtacctgcagggtcccatttgggccaaaattcctcacacagatggacactttcacccgtctcctcttatgggcggctttggactcaagaacccgcctcctcagatcctcatcaaaaacacgcctgttcctgcgaatcctccggcggagttttcagctacaaagtttgcttcattcatcacccaatactccacaggacaagtgagtgtggaaattgaatgggagctgcagaaagaaaacagcaagcgctggaatcccgaagtgcagtacacatccaattatgcaaaatctgccaacgttgattttactgtggacaacaatggactttatactgagcctcgccccattggcacccgttaccttacccgtcccctgtaa

SEQ ID NO: 341 - protein, 736 aa, Artificial Sequence
  Description of Artificial Sequence: Synthetic polypeptide
MAADGYLPDWLEDNLSEGIREWWDLKPGAPKPKANQQHQDNARGLVLPGYKYLGPGNGLDKGEPVNAADAAALEHDKAYDQQLKAGDNPYLKYNHADAEFQERLKEDTSFGGNLGRAVFQAKKRLLEPLGLVEEAAKTAPGKKRPVEPSPQRSPDSSTGIGKKGQQPAKKRLNFGQTGDSESVPDPQPLGEPPATPAAVGPTTMASGGGAPMADNNEGADGVGNSSGNWHCDSQWLGDRVITTSTRTWALPTYNNHLYKQISSQSGASNDNHYFGYSTPWGYFDFNRFHCHFSPRDWQRLINNNWGFRPKRLNFKLFNIQVKEVTTNDGVTTIANNLTSTVQVFSDSEYQLPYVLGSAHQGCLPPFPADVFMIPQYGYLTLNNGSQAVGRSSFYCLEYFPSQMLRTGNNFTFSYTFEDVPFHSSYAHSQSLDRLMNPLIDQYLYYLSRTNTPSGTTTQSRLQFSQAGASDIRDQSRNWLPGPCYRQQRVSKTKTDNNNSNFTWTGASKYNLNGRESIINPGTAMASHKDDEDKFFPMSGVMIFGKESAGASNTALDNVMITDEEEIKATNPVATERFGTVAVNFQSSSTDPATGDVHAMGALPGMVWQDRDVYLQGPIWAKIPHTDGHFHPSPLMGGFGLKNPPPQILIKNTPVPANPPAEFSATKFASFITQYSTGQVSVEIEWELQKENSKRWNPEVQYTSNYAKSANVDFTVDNNGLYTEPRPIGTRYLTRPL

SEQ ID NO: 342 - DNA, 2211 bp, Artificial Sequence
  Description of Artificial Sequence: Synthetic polynucleotide
atggctgccgatggttatcttccagattggctcgaggacaaccttagtgaaggaattcgcgagtggtgggcgctgaaacctggagccccgaagcccaaagccaaccagcaaaagcaggacgacggccggggtctggtgcttccgggttacaaatacctcggacccggtaacggactcgacaaaggagagccggtcaacgaggcggacgcggcagccctcgagcacgacaaggcctacgaccagcagctcaaagcgggtgacaatccgtacctgcggtataaccacgccgacgccgagtttcaggagcgtctgcaagaagatacgtcttttgggggcaacctcgggcgagcagtcttccaggccaagaagcgggttctcgaacctctcggtctggttgaggaaggcgctaagacggctcccggaaagaaacgtccggtagagcagtcgccacaagagccagactcctctacgggcatcggcaagaaaggccaacagcccgccagaaaaagactcaatttcggtcagactggcgactcagagtcagttccagaccctcaacctctcggagaacctccagcagcgccctctggtgtgggacctactacaatggcttcaggcggtggcgcaccaatggcagacaataacgaaggcgccgacggagtgggtaatgcctcaggaaattggcattgcgattccacatggctgggcgacagagtcatcaccaccagcacccgaacatgggccttgcccacctataacaaccacctctacaagcaaatctccagtgcttcaacgggggccagcaacgacaacacctacttcggctacagcaccccctgggggtattttgatttcaacagattccactgccatttctcaccacgtgactggcagcgactcatcaacaacaattggggattccggcccaagagactcaacttcaaactcttcaacatccaagtcaaggaggtcacgacgaatgatggcgtcacgaccatcgctaataaccttaccagcacggttcaagtcttctcggactcggagtaccagttgccgtacgtcctcggctctgcgcaccagggctgcctccctccgttcccggcggacgtgttcatgattccgcagtacggctacctaacgctcaacaatggcagccaggcagtgggacggtcatccttttactgcctggaatatttcccatcgcagatgctgagaacgggcaataactttaccttcagctacaccttcgaggacgtgcctttccacagcagctacgcgcacagccagagcctggaccggctgatgaatcctctcatcgaccagtacctgtattacctgaacagaactcagaatcagtccggaagtgcccaaaacaaggacttgctgtttagccgggggtctccagctggcatgtctgttcagcccaaaaactggctacctggaccctgttatcggcagcagcgcgtttctaaaacaaaaacagacaacaacaacagcaattttacctggactggtgcttcaaaatataacctcaatgggcgtgaatccatcatcaaccctggcactgctatggcctcacacaaagacgacgaagacaagttctttcccatgagcggtgtcatgatttttggaaaagagagcgccggagcttcaaacactgcattggacaatgtcatgattacagacgaagaggaaattaaagccactaaccctgtggccaccgaaagatttgggaccgtggcagtcaatttccagagcagcagcacagaccctgcgaccggagatgtgcatgttatgggagccttacctggaatggtgtggcaagacagagacgtatacctgcagggtcctatttgggccaaaattcctcacacagatggacactttcacccgtctcctcttatgggcggctttggactcaagaacccgcctcctcagatcctcatcaaaaacacgcctgttcctgcgaatcctccggcagagttttcggctacaaagtttgcttcattcatcacccagtattccacaggacaagtgagcgtggagattgaatgggagctgcagaaagaaaacagcaaacgctggaatcccgaagtgcagtatacatctaactatgcaaaatctgccaacgttgatttcactgtggacaacaatggactttatactgagcctcgccccattggcacccgttacctcacccgtcccctgtaa

SEQ ID NO: 343 - protein, 736 aa, Artificial Sequence
  Description of Artificial Sequence: Synthetic polypeptide
MAADGYLPDWLEDNLSEGIREWWALKPGAPKPKANQQKQDDGRGLVLPGYKYLGPGNGLDKGEPVNEADAAALEHDKAYDQQLKAGDNPYLRYNHADAEFQERLQEDTSFGGNLGRAVFQAKKRVLEPLGLVEEGAKTAPGKKRPVEQSPQEPDSSTGIGKKGQQPARKRLNFGQTGDSESVPDPQPLGEPPAAPSGVGPTTMASGGGAPMADNNEGADGVGNASGNWHCDSTWLGDRVITTSTRTWALPTYNNHLYKQISSASTGASNDNTYFGYSTPWGYFDFNRFHCHFSPRDWQRLINNNWGFRPKRLNFKLFNIQVKEVTTNDGVTTIANNLTSTVQVFSDSEYQLPYVLGSAHQGCLPPFPADVFMIPQYGYLTLNNGSQAVGRSSFYCLEYFPSQMLRTGNNFTFSYTFEDVPFHSSYAHSQSLDRLMNPLIDQYLYYLNRTQNQSGSAQNKDLLFSRGSPAGMSVQPKNWLPGPCYRQQRVSKTKTDNNNSNFTWTGASKYNLNGRESIINPGTAMASHKDDEDKFFPMSGVMIFGKESAGASNTALDNVMITDEEEIKATNPVATERFGTVAVNFQSSSTDPATGDVHVMGALPGMVWQDRDVYLQGPIWAKIPHTDGHFHPSPLMGGFGLKNPPPQILIKNTPVPANPPAEFSATKFASFITQYSTGQVSVEIEWELQKENSKRWNPEVQYTSNYAKSANVDFTVDNNGLYTEPRPIGTRYLTRPL

SEQ ID NO: 344 - DNA, 2205 bp, Artificial Sequence
  Description of Artificial Sequence: Synthetic polynucleotide
atggctgctgacggttatcttccagattggctcgaggacaacctttctgaaggcattcgtgagtggtgggctctgaaacctggagtccctcaacccaaagcgaaccaacaacaccaggacaaccgtcggggtcttgtgcttccgggttacaaatacctcggacccggtaacggactcgacaaaggagagccggtcaacgaggcggacgcggcagccctcgaacacgacaaggcctacgaccagcagctcaaggccggagacaacccgtacctcaagtacaaccacgccgacgccgagttccaggagcggctcaaagaagatacgtcttttgggggcaacctcgggcgagcagtcttccaggccaaaaagaggcttcttgaacctcttggtctggttgaggaagcggctaagacggctcctggaaagaagaggcctgtagagcagtctcctcaggaaccggactcctccgcgggtattggcaaatcgggtgcacagcccgctaaaaagagactcaatttcggtcagactggcgacacagagtcagtcccagaccctcaaccaatcggagaacctcccgcagccccctcaggtgtgggatctcttacaatggcttcaggtggtggcgcaccagtggcagacaataacgaaggtgccgatggagtgggtagttcctcgggaaattggcattgcgattcccaatggctgggggacagagtcatcaccaccagcacccgaacctgggccctgcccacctacaacaaccacctctacaaacaaatttccagccaatcaggagcctcgaacgacaatcactactttggctacagcaccccttgggggtattttgacttcaacagattccactgccacttttcaccacgtgactggcagcgactcatcaacaacaactggggattccggcccaagagactcagcttcaagctcttcaacatccaggtcaaagaggttacggacaacaatggagtcaagaccatcgccaataaccttaccagcacggtccaggtcttcacggactcagactatcagctcccgtacgtgctcgggtcggctcacgagggctgcctcccgccgttcccagcggacgttttcatgattcctcagtacgggtatctgacgcttaatgatggaagccaggccgtgggtcgttcgtccttttactgcctggaatatttcccgtcgcaaatgctaagaacgggtaacaacttccagttcagctacgagtttgagaacgtacctttccatagcagctacgctcacagccaaagcctggaccgactaatgaatccactcatcgaccaatacttgtactatctctcaaagactattaacggttctggacagaatcaacaaacgctaaaattcagtgtggccggacccagcaacatggctgtccagggaagaaactacatacctggacccagctaccgacaacaacgtgtctcaaccactgtgactcaaaacaacaacagcgaatttgcttggcctggagcttcttcttgggctctcaatggacgtaatagcttgatgaatcctggacctgctatggccagccacaaagaaggagaggaccgtttctttcctttgtctggatctttaatttttggcaaacaaggaactggaagagacaacgtggatgcggacaaagtcatgataaccaacgaagaagaaattaaaactactaacccggtagcaacggagtcctatggacaagtggccacaaaccaccagagtgcccaagcacaggcgcagaccggctgggttcaaaaccaaggaatacttccgggtatggtttggcaggacagagatgtgtacctgcaaggacccatctgggccaagattcctcacacggacggcaacttccacccgtctccgctgatgggcggctttggcctgaaacatcctccgcctcagatcctgatcaagaacacgcctgtacctgcggatcctccgaccaccttcaaccagtcaaagctgaactctttcatcacgcaatacagcaccggacaggtcagcgtggaaattgaatgggagctgcagaaggaaaacagcaagcgctggaatcccgaagtgcagtatacatctaactatgcaaaatctgccaacgttgatttcactgtggacaacaatggactttatactgagcctcgccccattggcacccgttacctcacccgtcccctgtaa

SEQ ID NO: 345 - protein, 734 aa, Artificial Sequence
  Description of Artificial Sequence: Synthetic polypeptide
MAADGYLPDWLEDNLSEGIREWWALKPGVPQPKANQQHQDNRRGLVLPGYKYLGPGNGLDKGEPVNEADAAALEHDKAYDQQLKAGDNPYLKYNHADAEFQERLKEDTSFGGNLGRAVFQAKKRLLEPLGLVEEAAKTAPGKKRPVEQSPQEPDSSAGIGKSGAQPAKKRLNFGQTGDTESVPDPQPIGEPPAAPSGVGSLTMASGGGAPVADNNEGADGVGSSSGNWHCDSQWLGDRVITTSTRTWALPTYNNHLYKQISSQSGASNDNHYFGYSTPWGYFDFNRFHCHFSPRDWQRLINNNWGFRPKRLSFKLFNIQVKEVTDNNGVKTIANNLTSTVQVFTDSDYQLPYVLGSAHEGCLPPFPADVFMIPQYGYLTLNDGSQAVGRSSFYCLEYFPSQMLRTGNNFQFSYEFENVPFHSSYAHSQSLDRLMNPLIDQYLYYLSKTINGSGQNQQTLKFSVAGPSNMAVQGRNYIPGPSYRQQRVSTTVTQNNNSEFAWPGASSWALNGRNSLMNPGPAMASHKEGEDRFFPLSGSLIFGKQGTGRDNVDADKVMITNEEEIKTTNPVATESYGQVATNHQSAQAQAQTGWVQNQGILPGMVWQDRDVYLQGPIWAKIPHTDGNFHPSPLMGGFGLKHPPPQILIKNTPVPADPPTTFNQSKLNSFITQYSTGQVSVEIEWELQKENSKRWNPEVQYTSNYAKSANVDFTVDNNGLYTEPRPIGTRYLTRPL

SEQ ID NO: 346 - DNA, 2211 bp, Artificial Sequence
  Description of Artificial Sequence: Synthetic polynucleotide
atggctgccgatggttatcttccagattggctcgaggacaacctctctgagggcattcgcgagtggtgggcgctgaaacctggagccccgaagcccaaagccaaccagcaaaagcaggacgacggccggggtctggtgcttcctggctacaagtacctcggacccttcaacggactcgacaagggggagcccgtcaacgcggcggacgcagcggccctcgagcacgacaaggcctacgaccagcagctgcaggcgggtgacaatccgtacctgcggtataaccacgccgacgccgagtttcaggagcgtctgcaagaagatacgtcttttgggggcaacctcgggcgagcagtcttccaggccaagaagtgggttctcgaacctctcggtctggttgaggaaggcgctaagacggctcctggaaagaaacgtccggtagagcagtcgccacaagagccagactcctcctcgggcatcggcaagacaggccagcagcccgctaaaaagagactcaattttggtcagactggcgactcagagtcagtccccgacccacaacctctcggagaacctccagcaacccccgctgctgtgggacctactacaatggcttcaggcggtggcgcaccaatggcagacaataacgaaggcgccgacggagtgggtaatgcctcaggaaattggcattgcgattccacatggctgggcgacagagtcatcaccaccagcacccgcacctgggccttgcccacctacaataaccacctctacaagcaaatctccagtgcttcaacgggggccagcaacgacaaccactacttcggctacagcaccccctgggggtattttgatttcaacagattccactgccatttctcaccacgtgactggcagcgactcatcaacaacaattggggattccggcccaagagactcaacttcaagctcttcaacatccaagtcaaggaggtcacgacgaatgatggcgtcacaaccatcgctaataaccttaccagcacggttcaagtcttctcggactcggagtaccagcttccgtacgtcctcggctctgcgcaccagggctgcctccctccgttcccggcggacgtgttcatgattccgcaatacggctacctgacgctcaacaatggcagccaagccgtgggacgttcatccttttactgcctggaatatttcccttctcagatgctgagaacgggcaacaactttaccttcagctacacctttgaggaagtgcctttccacagcagctacgcgcacagccagagcctggaccggctgatgaatcctctcatcgaccaatacctgtattacctgaacagaactcaaaatcagtccggaagtgcccaaaacaaggacttgctgtttagccgtgggtctccagctggcatgtctgttcagcccaaaaactggctacctggaccctgttatcggcagcagcgcgtttctaaaacaaaaacagacaacaacaacagcaattttacctggactggtgcttcaaaatataacctcaatgggcgtgaatccatcatcaaccctggcactgctatggcctcacacaaagacgacgaagacaagttctttcccatgagcggtgtcatgatttttggaaaggagagcgccggagcttcaaacactgcattggacaatgtcatgatcaccgacgaagaggaaatcaaagccactaaccccgtggccaccgaaagatttgggactgtggcagtcaatctccagagcagcagcacagaccctgcgaccggagatgtgcatgttatgggagccttacctggcatggtgtggcaagatagagacgtgtacctgcagggtcccatttgggccaaaattcctcacacagatggacactttcacccgtctcctcttatgggcggctttggactcaagaacccgcctcctcagatcctcatcaaaaacacgcctgttcctgcgaatcctccggcggagttttcagctacaaagtttgcttcattcatcacccaatactccacaggacaagtgagtgtggaaattgaatgggagctgcagaaagaaaacagcaagcgctggaatcccgaagtgcagtacacatccaattatgcaaaatctgccaacgttgattttactgtggacaacaatggactttatactgagcctcgccccattggcacccgttacctcacccgtcccctgtaa

SEQ ID NO: 347 - protein, 736 aa, Artificial Sequence
  Description of Artificial Sequence: Synthetic polypeptide
MAADGYLPDWLEDNLSEGIREWWALKPGAPKPKANQQKQDDGRGLVLPGYKYLGPFNGLDKGEPVNAADAAALEHDKAYDQQLQAGDNPYLRYNHADAEFQERLQEDTSFGGNLGRAVFQAKKWVLEPLGLVEEGAKTAPGKKRPVEQSPQEPDSSSGIGKTGQQPAKKRLNFGQTGDSESVPDPQPLGEPPATPAAVGPTTMASGGGAPMADNNEGADGVGNASGNWHCDSTWLGDRVITTSTRTWALPTYNNHLYKQISSASTGASNDNHYFGYSTPWGYFDFNRFHCHFSPRDWQRLINNNWGFRPKRLNFKLFNIQVKEVTTNDGVTTIANNLTSTVQVFSDSEYQLPYVLGSAHQGCLPPFPADVFMIPQYGYLTLNNGSQAVGRSSFYCLEYFPSQMLRTGNNFTFSYTFEEVPFHSSYAHSQSLDRLMNPLIDQYLYYLNRTQNQSGSAQNKDLLFSRGSPAGMSVQPKNWLPGPCYRQQRVSKTKTDNNNSNFTWTGASKYNLNGRESIINPGTAMASHKDDEDKFFPMSGVMIFGKESAGASNTALDNVMITDEEEIKATNPVATERFGTVAVNLQSSSTDPATGDVHVMGALPGMVWQDRDVYLQGPIWAKIPHTDGHFHPSPLMGGFGLKNPPPQILIKNTPVPANPPAEFSATKFASFITQYSTGQVSVEIEWELQKENSKRWNPEVQYTSNYAKSANVDFTVDNNGLYTEPRPIGTRYLTRPL

SEQ ID NO: 348 - DNA, 2214 bp, Artificial Sequence
  Description of Artificial Sequence: Synthetic polynucleotide
atggctgccgatggttatcttccagattggctcgaggacaaccttagtgaaggaattcgcgagtggtgggctttgaaacctggagcccctcaacccaaggcaaatcaacaacatcaagacaacgctcgaggtcttgtgcttccgggttacaaataccttggacccggcaacggactcgacaagggggagccggtcaacgcagcagacgcggcggccctcgagcacgacaaggcctacgaccagcagctgcaggcgggtgacaatccgtacctgcggtataaccacgccgacgccgagtttcaggagcgtctgcaagaagatacgtcttttgggggcaaccttggcagagcagtcttccaggccaaaaagaggatccttgagcctcttggtctggttgaggaagcagctaaaacggctcctggaaagaagaggcctgtagatcagtctcctcaggaaccggactcatcatctggtgttggcaaatcgggcaaacagcctgccagaaaaagactaaatttcggtcagactggcgactcagagtcagtcccagaccctcaacctctcggagaaccaccagcagcccccacaagtttgggatctaatacaatggcttcaggcggtggcgcaccaatggcagacaataacgagggtgccgatggggtgggtagttcctcgggaaattggcattgcgattcccaatggctgggggacagagtcatcaccaccagcacccgaacctgggccctgcccacctacaacaatcacctctacaagcaaatctccaacgggacatcgggaggagccaccaacgacaacacctacttcggctacagcaccccctgggggtattttgactttaacagattccactgccacttttcaccacgtgactggcagcgactcatcaacaacaactggggattccggcccaagagactcagcttcaagctcttcaacatccaggtcaaggaggtcacgcagaatgaaggcaccaagaccatcgccaataacctcaccagcaccatccaggtgtttacggactcggagtaccagctgccgtacgttctcggctcggcgcaccagggctgcctccctccgttcccggcggacgtcttcatggtgccacagtatggatacctgacgctcaacaatggcagccaagccgtgggacgttcatccttttactgcctggaatatttcccttctcagatgctgagaacgggcaacaactttaccttcagctacacctttgaggaagtgcctttccacagcagctacgcgcacagccagagcttggaccggctgatgaatcctctgattgaccagtacctgtactacttgtctcggactcaaacaacaggaggcacggcaaatacgcagactctgggcttcagccaaggtgggcctaatacaatggccaatcaggcaaagaactggctgccaggaccctgttaccgccaacaacgcgtctcaacgacaaccgggcaaaacaacaatagcaactttgcctggactgctgggaccaaataccatctgaatggaagaaattcattggctaatcctggcatcgctatggcaacacacaaagacgacgaggagcgtttttttcccagtaacgggatcctgatttttggcaaacaaaatgctgccagagacaatgcggattacagcgatgtcatgctcaccagcgaggaagaaatcaaaaccactaaccctgtggctacagaggaatacggtatcgtggcagataacttgcagcagcaaaacacggctcctcaaattggaactgtcaacagccagggggacttacccggtatggtctggcagaaccgggacgtgtacctgcagggtcccatctgggccaagattcctcacacggacggcaacttccacccgtctccgctgatgggcggctttggcctgaaacatcctccgcctcagatcctgatcaagaacacgcctgtacctgcggatcctccgaccaccttcaaccagtcaaagctgaactctttcatcacgcaatacagcaccggacaggtcagcgtggagatcgagtgggagctgcagaaggaaaacagcaagcgctggaacccggagatccagtacacttccaactattacaagtctaataatgttgaatttgctgttaatactgaaggtgtatatagtgaaccccgccccattggcaccagatacctgactcgtaatctgtaa

SEQ ID NO: 349 - protein, 737 aa, Artificial Sequence
  Description of Artificial Sequence: Synthetic polypeptide
MAADGYLPDWLEDNLSEGIREWWALKPGAPQPKANQQHQDNARGLVLPGYKYLGPGNGLDKGEPVNAADAAALEHDKAYDQQLQAGDNPYLRYNHADAEFQERLQEDTSFGGNLGRAVFQAKKRILEPLGLVEEAAKTAPGKKRPVDQSPQEPDSSSGVGKSGKQPARKRLNFGQTGDSESVPDPQPLGEPPAAPTSLGSNTMASGGGAPMADNNEGADGVGSSSGNWHCDSQWLGDRVITTSTRTWALPTYNNHLYKQISNGTSGGATNDNTYFGYSTPWGYFDFNRFHCHFSPRDWQRLINNNWGFRPKRLSFKLFNIQVKEVTQNEGTKTIANNLTSTIQVFTDSEYQLPYVLGSAHQGCLPPFPADVFMVPQYGYLTLNNGSQAVGRSSFYCLEYFPSQMLRTGNNFTFSYTFEEVPFHSSYAHSQSLDRLMNPLIDQYLYYLSRTQTTGGTANTQTLGFSQGGPNTMANQAKNWLPGPCYRQQRVSTTTGQNNNSNFAWTAGTKYHLNGRNSLANPGIAMATHKDDEERFFPSNGILIFGKQNAARDNADYSDVMLTSEEEIKTTNPVATEEYGIVADNLQQQNTAPQIGTVNSQGDLPGMVWQNRDVYLQGPIWAKIPHTDGNFHPSPLMGGFGLKHPPPQILIKNTPVPADPPTTFNQSKLNSFITQYSTGQVSVEIEWELQKENSKRWNPEIQYTSNYYKSNNVEFAVNTEGVYSEPRPIGTRYLTRNL

SEQ ID NO: 350 - DNA, 2205 bp, Artificial Sequence
  Description of Artificial Sequence: Synthetic polynucleotide
atggctgctgacggttatcttccagattggctcgaggacaacctttctgaaggcattcgtgagtggtgggctctgaaacctggagtccctcaacccaaagcgaaccaacaacaccaggacaactgtcggggtcttgtgcttccgggttacaaatacctcggacccggtaacggactcgacaaaggagagccggtcaacgaggcggacgcggcagccctcgaacacgacaaggcctacgaccagcagctcaaggccggagacaacccgtacctcaagtacaaccacgccgacgccgagttccaggagcggctcaaagaagatacgtcttttgggggcaacctcgggcgagcagtcttccagaccaaaaagaggcttcttgaacctcttggtctggttgaggaagcggctaagacggctcctggaaagaagaggcctgtagagcagtctcctcaggaaccggactcctccgcgggtattggcaaatcgggtgcacagcccgctaaaaagagactcaatttcggtcagactggcgacacagagtcagtcccagaccctcaaccaatcggagaacctcccgcagccccctcaggtgtgggatctcttacaatggcttcaggtggtggcgcaccagtggcagacaataacgaaggtgccgatggagtgggtagttcctcgggaaattggcattgcgattcccaatggctgggggacagagtcatcaccaccagcacccgaacctgggccctgcccacctacaacaaccacctctacaaacaaatttccagccaatcaggagcctcgaacgacaatcactactttggctacagcaccccttgggggtattttgacttcaacagattccactgccacttttcaccacgtgactggcagcgactcatcaacaacaactggggattccggcccaagagactcagcttcaagctcttcaacatccaggtcaaagaggttacggacaacaatggagtcaagaccatcgccaataaccttaccagcacggtccaggtcttcacggactcagactatcagctcccgtacgtgctcgggtcggctcacgagggctgcctcccgccgttcccagcggacgttttcatgattcctcagtacgggtatctgacgcttaatgatggaagccaggccgtgggtcgttcgtccttttactgcctggaatatttcccgtcgcaaatgctaagaacgggtaacaacttccagttcagctacgagtttgagaacgtacctttccatagcagctacgctcacagccaaagcctggaccgactaatgaatccactcatcgaccaatacttgtactatctctcaaagactattaacggttctggacagaatcaacaaacgctaaaattcagtgtggccggacccagcaacatggctgtccagggaagaaactacatacctggacccagctaccgacaacaacgtgtctcaaccactgtgactcaaaacaacaacagcgaatttgcttggcctggagcttcttcttgggctctcaatggacgtaatagcttgatgaatcctggacctgctatggccagccacaaagaaggagaggaccgtttctttcctttgtctggatctttaatttttggcaaacaaggaactggaagagacaacgtggatgcggacaaagtcatgataaccaacgaagaagaaattaaaactactaacccggtagcaacggagtcctatggacaagtggccacaaaccaccagagtgcccaagcacaggcgcagaccggctgggttcaaaaccaaggaatacttccgggtatggtttggcaggacagagatgtgtacctgcaaggacccatctgggccaagattcctcacacggacggcaacttccacccgtctccgctgatgggcggctttggcctgaaacatcctccgcctcagatcctgatcaagaacacgcctgttcctgcgaatcctccggcggagttttcagctacaaagtttgcttcattcatcacccagtactccacaggacaagtgagtgtggaaattgaatgggagctgcagaaagaaaacagcaagcgctggaatcccgaagtgcagtacacatccaattatgcaaaatctgccaacgttgattttactgtggacaacaatggactttatactgagcctcgccccattggcacccgttaccttaccaaacctctgtaa

SEQ ID NO: 351 - protein, 734 aa, Artificial Sequence
  Description of Artificial Sequence: Synthetic polypeptide
MAADGYLPDWLEDNLSEGIREWWALKPGVPQPKANQQHQDNCRGLVLPGYKYLGPGNGLDKGEPVNEADAAALEHDKAYDQQLKAGDNPYLKYNHADAEFQERLKEDTSFGGNLGRAVFQTKKRLLEPLGLVEEAAKTAPGKKRPVEQSPQEPDSSAGIGKSGAQPAKKRLNFGQTGDTESVPDPQPIGEPPAAPSGVGSLTMASGGGAPVADNNEGADGVGSSSGNWHCDSQWLGDRVITTSTRTWALPTYNNHLYKQISSQSGASNDNHYFGYSTPWGYFDFNRFHCHFSPRDWQRLINNNWGFRPKRLSFKLFNIQVKEVTDNNGVKTIANNLTSTVQVFTDSDYQLPYVLGSAHEGCLPPFPADVFMIPQYGYLTLNDGSQAVGRSSFYCLEYFPSQMLRTGNNFQFSYEFENVPFHSSYAHSQSLDRLMNPLIDQYLYYLSKTINGSGQNQQTLKFSVAGPSNMAVQGRNYIPGPSYRQQRVSTTVTQNNNSEFAWPGASSWALNGRNSLMNPGPAMASHKEGEDRFFPLSGSLIFGKQGTGRDNVDADKVMITNEEEIKTTNPVATESYGQVATNHQSAQAQAQTGWVQNQGILPGMVWQDRDVYLQGPIWAKIPHTDGNFHPSPLMGGFGLKHPPPQILIKNTPVPANPPAEFSATKFASFITQYSTGQVSVEIEWELQKENSKRWNPEVQYTSNYAKSANVDFTVDNNGLYTEPRPIGTRYLTKPL

SEQ ID NO: 352 - DNA, 2211 bp, Artificial Sequence
  Description of Artificial Sequence: Synthetic polynucleotide
atggctgccgatggttatcttccagattggctcgaggacaacctctctgagggcattcgcgagtggtgggacttgaaacctggagcccctaaacccaaggcaaatcaacaacatcaggacaacgctcgaggtcttgtgcttccgggttacaaataccttggacccggcaacggactcgacaagggggagccggtcaacgcagcagacgcggcggccctcgagcacgacaaggcctacgaccagcagctcaaggccggagacaacccgtacctcaagtacaaccacgccgacgccgagttccaggagcggctcaaagaagatacgtcttttgggggcaacctcgggcgagcagtcttccaggccaaaaagaggcttcttgaacctcttggtctggttgaggaagcggctaagacggctcctggaaagaagagaccggtagagccatcaccccagcgttctccagactcctctacgggcatcggcaagaaaggccaacagcccgctaaaaagagactcaattttggtcagactggcgactcagagtcagtccccgacccacaacctctcggagaacctccagcaacccccgctgctgtgggacctactacaatggcttcaggcggtggcgcaccaatggcagacaataacgagggtgccgatggagtgggtaattcctcaggaaattggcattgcgattcccaatggctgggcgacagagtcatcaccaccagcaccagaacctgggccctgcccacttacaacaaccatctctacaagcaaatctccagccaatcaggagcttcaaacgacaaccactactttggctacagcaccccttgggggtattttgactttaacagattccactgccacttttcaccacgtgactggcaaagactcatcaacaacaactggggattccgacccaagagactcaacttcaagctcttcaacatccaagtcaaggaggtcacgacgaatgatggcgtcacgaccatcgctaataaccttaccagcacggttcaagtcttctcggactcggagtaccagttgccgtacgtcctcggctctgcgcaccagggctgcctccctccgttcccggcggacgtgttcatgattccgcagtacggctacctaacgctcaacaatggcagccaagccgtgggacgttcatccttttactgcctggaatatttcccttctcagatgctgagaacgggcaacaactttaccttcagctacacttttgaggacgttcctttccacagcagctacgctcacagccagagtctggaccgtctcatgaatcctctcatcgaccagtacctgtattacttgagcagaacaaacactccaagtggaaccaccacgcagtcaaggcttcagttttctcaggccggagcgagtgacattcgggaccagtctaggaactggcttcctggaccctgttaccgccagcagcgcgtttctaaaacaaaaacagacaacaacaacagcaattttacctggactggtgcttcaaaatataaccttaatgggcgtgaatctataatcaaccctggcactgctatggcctcacacaaagacgacgaagacaagttctttcccatgagcggtgtcatgatttttggaaaagagagcgccggagcttcaaacactgcattggacaatgtcatgatcacagacgaagaggaaatcaaagccactaaccccgtggccaccgaaagatttgggactgtggcagtcaatctccagagcagcagcacagaccctgcgaccggagatgtgcatgttatgggagcattacctggcatggtgtggcaagatagagacgtgtacctgcagggtcccatttgggccaaaattcctcacacagatggacactttcacccgtctcctcttatgggcggctttggactcaagaacccgcctcctcagatcctcatcaaaaacacgcctgttcctgcgaatcctccggcggagttttcagctacaaagtttgcttcattcatcacccaatactccacaggacaagtgagtgtggaaattgaatgggagctgcagaaagaaaacagcaagcgctggaatcccgaagtgcagtacacatccaattatgcaaaatctgccaacgttgattttactgtggacaacaatggactttatactgagcctcgccccattggcacccgttaccttacccgtcccctgtaa

SEQ ID NO: 353 - protein, 736 aa, Artificial Sequence
  Description of Artificial Sequence: Synthetic polypeptide
MAADGYLPDWLEDNLSEGIREWWDLKPGAPKPKANQQHQDNARGLVLPGYKYLGPGNGLDKGEPVNAADAAALEHDKAYDQQLKAGDNPYLKYNHADAEFQERLKEDTSFGGNLGRAVFQAKKRLLEPLGLVEEAAKTAPGKKRPVEPSPQRSPDSSTGIGKKGQQPAKKRLNFGQTGDSESVPDPQPLGEPPATPAAVGPTTMASGGGAPMADNNEGADGVGNSSGNWHCDSQWLGDRVITTSTRTWALPTYNNHLYKQISSQSGASNDNHYFGYSTPWGYFDFNRFHCHFSPRDWQRLINNNWGFRPKRLNFKLFNIQVKEVTTNDGVTTIANNLTSTVQVFSDSEYQLPYVLGSAHQGCLPPFPADVFMIPQYGYLTLNNGSQAVGRSSFYCLEYFPSQMLRTGNNFTFSYTFEDVPFHSSYAHSQSLDRLMNPLIDQYLYYLSRTNTPSGTTTQSRLQFSQAGASDIRDQSRNWLPGPCYRQQRVSKTKTDNNNSNFTWTGASKYNLNGRESIINPGTAMASHKDDEDKFFPMSGVMIFGKESAGASNTALDNVMITDEEEIKATNPVATERFGTVAVNLQSSSTDPATGDVHVMGALPGMVWQDRDVYLQGPIWAKIPHTDGHFHPSPLMGGFGLKNPPPQILIKNTPVPANPPAEFSATKFASFITQYSTGQVSVEIEWELQKENSKRWNPEVQYTSNYAKSANVDFTVDNNGLYTEPRPIGTRYLTRPL

SEQ ID NO: 354 - DNA, 2214 bp, Artificial Sequence; identical to SEQ ID NO: 326
  Description of Artificial Sequence: Synthetic polynucleotide

SEQ ID NO: 355 - protein, 737 aa, Artificial Sequence; identical to SEQ ID NO: 327
  Description of Artificial Sequence: Synthetic polypeptide

SEQ ID NO: 356 - DNA, 2205 bp, Artificial Sequence
  Description of Artificial Sequence: Synthetic polynucleotide
atggctgctgacggttatcttccagattggctcgaggacaacctttctgaaggcattcgtgagtggtgggctctgaaacctggagtccctcaacccaaagcgaaccaacaacaccaggacaaccgtcggggtcttgtgcttccgggttacaaatacctcggacccggtaacggactcgacaaaggagagccggtcaacgaggcggacgcggcagccctcgaacacgacaaggcctacgaccagcagctcaaggccggagacaacccgtacctcaagtacaaccacgccgacgccgagttccaggagcggctcaaagaagatacgtcttttgggggcaacctcgggcgagcagtcttccaggccaaaaagaggcttcttgaacctcttggtctggttgaggaagcggctaagacggctcctggaaagaagaggcctgtagagcagtctcctcaggaaccggactcctccgcgggtattggcaaatcgggtgcacagcccgctaaaaagagactcaatttcggtcagactggcgacacagagtcagtcccagaccctcaaccaatcggagaacctcccgcagccccctcaggtgtgggatctcttacaatggcttcaggtggtggcgcaccagtggcagacaataacgaaggtgccgatggagtgggtagttcctcgggaaattggcattgcgattcccaatggctgggggacagagtcatcaccaccagcacccgaacctgggccctgcccacctacaacaaccacctctacaaacaaatttccagccaatcaggagcctcgaacgacaatcactactttggctacagcaccccttgggggtattttgacttcaacagattccactgccacttttcaccacgtgactggcagcgactcatcaacaacaactggggattccggcccaagagactcagcttcaagctcttcaacatccaggtcaaagaggttacggacaacaatggagtcaagaccatcgccaataaccttaccagcacggtccaggtcttcacggactcagactatcagctcccgtacgtgctcgggtcggctcacgagggctgcctcccgccgttcccagcggacgttttcatgattcctcagtacgggtatctgacgcttaatgatggaagccaggccgtgggtcgttcgtccttttactgcctggaatatttcccgtcgcaaatgctaagaacgggtaacaacttccagttcagctacgagtttgagaacgtacctttccatagcagctacgctcacagccaaagcctggaccgactaatgaatccactcatcgaccaatacttgtactatctctcaaagactattaacggttctggacagaatcaacaaacgctaaaattcagtgtggccggacccagcaacatggctgtccagggaagaaactacatacctggacccagctaccgacaacaacgtgtctcaaccactgtgactcaaaacaacaacagcgaatttgcttggcctggagcttcttcttgggctctcaatggacgtaatagcttgatgaatcctggacctgctatggccagccacaaagaaggagaggaccgtttctttcctttgtctggatctttaatttttggcaaacaaggaactggaagagacaacgtggatgcggacaaagtcatgataaccaacgaagaagaaattaaaactactaacccggtagcaacggagtcctatggacaagtggccacaaaccaccagagtgcccaagcacaggcgcagaccggctgggttcaaaaccaaggaatacttccgggtatggtttggcaggacagagatgtgtacctgcaaggacccatttgggccaaaattcctcacacggacggcaactttcacccttctccgctgatgggagggtttggaatgaaacacccgcctcctcagatcctcatcaaaaacacacctgtacctgcggatcctccaacggccttcaacaaggacaagctgaactctttcatcacccagtattctactggccaagtcagcgtggagatcgagtgggagctgcagaaggaaaacagcaagcgctggaaccccgagatccagtacacctccaactactacaaatctacaagtgtggactttgctgttaatacagaaggcgtgtactctgaaccccgccccattggcacccgttacctcacccgtaatctgtaa

SEQ ID NO: 357 - protein, 734 aa, Artificial Sequence
  Description of Artificial Sequence: Synthetic polypeptide
MAADGYLPDWLEDNLSEGIREWWALKPGVPQPKANQQHQDNRRGLVLPGYKYLGPGNGLDKGEPVNEADAAALEHDKAYDQQLKAGDNPYLKYNHADAEFQERLKEDTSFGGNLGRAVFQAKKRLLEPLGLVEEAAKTAPGKKRPVEQSPQEPDSSAGIGKSGAQPAKKRLNFGQTGDTESVPDPQPIGEPPAAPSGVGSLTMASGGGAPVADNNEGADGVGSSSGNWHCDSQWLGDRVITTSTRTWALPTYNNHLYKQISSQSGASNDNHYFGYSTPWGYFDFNRFHCHFSPRDWQRLINNNWGFRPKRLSFKLFNIQVKEVTDNNGVKTIANNLTSTVQVFTDSDYQLPYVLGSAHEGCLPPFPADVFMIPQYGYLTLNDGSQAVGRSSFYCLEYFPSQMLRTGNNFQFSYEFENVPFHSSYAHSQSLDRLMNPLIDQYLYYLSKTINGSGQNQQTLKFSVAGPSNMAVQGRNYIPGPSYRQQRVSTTVTQNNNSEFAWPGASSWALNGRNSLMNPGPAMASHKEGEDRFFPLSGSLIFGKQGTGRDNVDADKVMITNEEEIKTTNPVATESYGQVATNHQSAQAQAQTGWVQNQGILPGMVWQDRDVYLQGPIWAKIPHTDGNFHPSPLMGGFGMKHPPPQILIKNTPVPADPPTAFNKDKLNSFITQYSTGQVSVEIEWELQKENSKRWNPEIQYTSNYYKSTSVDFAVNTEGVYSEPRPIGTRYLTRNL

SEQ ID NO: 358 - DNA, 2217 bp, Artificial Sequence
  Description of Artificial Sequence: Synthetic polynucleotide
atggctgccgatggttatcttccagattggctcgaggacaacctctctgagggcattcgcgagtggtgggcgctgaaacctggagccccgaagcccaaagccaaccagcaaaagcaggacgacggccggggtctggtgcttcctggctacaagtacctcggacccttcaacggactcgacaagggggagcccgtcaacgcggcggacgcagcggccctcgagcacgacaaggcctacgaccagcagctgcaggcgggtgacaatccgtacctgcggtataaccacgccgacgccgagtttcaggagcgtctgcaagaagatacgtcttttgggggcaacctcgggcgagcagtcttccaggccaagaagcgggttctcgaacctctcggtctggttgaggaaggcgctaagacggctcctggaaagaagagaccggtagagccatcaccccagcgttctccagactcctctacgggcatcggcaagaaaggccaacagcccgccagaaaaagactcaattttggtcagactggcgactcagagtcagttccagaccctcaacctctcggagaacctccagcagcgccctctggtgtgggacctaatacaatggctgcaggcggtggcgcaccaatggcagacaataacgaaggcgccgacggagtgggtagttcctcgggaaattggcattgcgattccacatggctgggcgacagagtcatcaccaccagcacccgaacctgggccctgcccacctacaacaaccacctctacaagcaaatctccaacgggacatcgggaggagccaccaacgacaacacctacttcggctacagcaccccctgggggtattttgactttaacagattccactgccacttttcaccacgtgactggcagcgactcatcaacaacaactggggattccggcccaagagactcagcttcaagctcttcaacatccaggtcaaggaggtcacgcagaatgaaggcaccaagaccatcgccaataacctcaccagcaccatccaggtgtttacggactcggagtaccagctgccgtacgttctcggctctgcccaccagggctgcctgcctccgttcccggcggacgtgttcatgattccccagtacggctacctaacactcaacaacggtagtcaggccgtgggacgctcctccttctactgcctggaatactttccttcgcagatgctgagaaccggcaacaacttccagtttacttacaccttcgaggacgtgcctttccacagcagctacgcccacagccagagcttggaccggctgatgaatcctctgattgaccagtacctgtactacttgtctcggactcaaacaacaggaggcacggcaaatacgcagactctgggcttcagccaaggtgggcctaatacaatggccaatcaggcaaagaactggctgccaggaccctgttaccgccaacaacgcgtctcaacgacaaccgggcaaaacaacaatagcaactttgcctggactgctgggaccaaataccatctgaatggaagaaattcattggctaatcctggcatcgctatggcaacacacaaagacgacgaggagcgtttttttcccagtaacgggatcctgatttttggcaaacaaaatgctgccagagacaatgcggattacagcgatgtcatgctcaccagcgaggaagaaatcaaaaccactaaccctgtggctacagaggaatacggtatcgtggcagataacttgcagcagcaaaacacggctcctcaaattggaactgtcaacagccagggggccttacccggtatggtctggcagaaccgggacgtgtacctgcagggtcccatctgggccaagattcctcacacggacggcaacttccacccctctcccctcatgggtggattcggacttaaacatcctccgcctcagatcctgatcaagaacacgcctgtacctgcggatcctccgaccaccttcaaccagtcaaagctgaactctttcatcacgcaatacagcaccggacaggtcagcgtggaaattgaatgggagctgcagaaggaaaacagcaagcgctggaaccccgagatccagtacacctccaactactacaaatctacaagtgtggactttgctgttaatacagaaggcgtgtactctgaaccccgccccattggcacccgttacctcacccgtaatctgtaa

SEQ ID NO: 359 - protein, 738 aa, Artificial Sequence; identical to SEQ ID NO: 105
  Description of Artificial Sequence: Synthetic polypeptide

SEQ ID NO: 360 - DNA, 2211 bp, Artificial Sequence
  Description of Artificial Sequence: Synthetic polynucleotide
atggctgctgacggttatcttccagattggctcgaggacaacctttctgaaggcattcgagagtggtgggcgctgcaacctggagcccctaaacccaaggcaaatcaacaacatcaggacaacgctcggggtcttgtgcttccgggttacaaatacctcggacccggcaacggactcgacaagggggaacccgtcaacgcagcggacgcggcagccctcgagcacgacaaggcctacgaccagcagctcaaggccggtgacaacccctacctcaagtacaaccacgccgacgccgagttccaggagcggctcaaagaagatacgtcttttgggggcaacctcgggcgagcagtcttccaggccaaaaagaggcttcttgaacctcttggtctggttgaggaagcggctaagacggctcctggaaagaagaggcctgtagatcagtctcctcaggaaccggactcatcatctggtgttggcaaatcgggcaaacagcctgccagaaaaagactaaatttcggtcagactggcgactcagagtcagtcccagaccctcaacctctcggagaaccaccagcagcccccacaagtttgggatctaatacaatggcttcaggcggtggcgcaccaatggcagacaataacgagggtgccgatggagtgggtaattcctcaggaaattggcattgcgattcccaatggctgggcgacagagtcatcaccaccagcaccagaacctgggccctgcccacttacaacaaccatctctacaagcaaatctccagccaatcaggagcttcaaacgacaaccactactttggctacagcaccccttgggggtattttgactttaacagattccactgccacttctcaccacgtgactggcagcgactcattaacaacaactggggattccggcccaagaaactcagcttcaagctcttcaacatccaagttaaagaggtcacgcagaacgatggcacgacgactattgccaataaccttaccagcacggttcaggtgtttacggactcggagtatcagctcccgtacgtgctcgggtcggcgcaccaaggctgtctcccgccgtttccagcggacgtcttcatggtccctcagtatggatacctcaccctgaacaacggaagtcaagcggtgggacgctcatccttttactgcctggagtacttcccttcgcagatgctaaggactggaaataacttccaattcagctataccttcgaggatgtaccttttcacagcagctacgctcacagccagagtttggatcgcttgatgaatcctcttattgatcagtatctgtactacctgaacagaacgcaaggaacaacctctggaacaaccaaccaatcacggctgctttttagccaggctgggcctcagtctatgtctttgcaggccagaaattggctacctgggccctgctaccggcaacagagactttcaaagactgctaacgacaacaacaacagtaactttccttggacagcggccagcaaatatcatctcaatggccgcgactcgctggtgaatccaggaccagctatggccagtcacaaggacgatgaagaaaaatttttccctatgcacggcaatctaatatttggcaaagaagggacaacggcaagtaacgcagaattagataatgtaatgattacggatgaagaagagattcgtaccaccaatcctgtggcaacagagcagtatggaactgtggcaaataacttgcagagctcaaatacagctcccacgactagaactgtcaatgatcagggggccttacctggcatggtgtggcaagatcgtgacgtgtaccttcaaggacctatctgggcaaagattcctcacacggatggacactttcatccttctcctctgatgggaggctttggactgaaacatccgcctcctcaaatcatgatcaaaaatactccggtaccggcaaatcctccgacgactttcagcccggccaagtttgcttcatttatcactcagtactccactggacaggtcagcgtggaaattgagtgggagctacagaaagaaaacagcaaacgttggaatccagagattcagtacacttccaactacaacaagtctgttaatgtggactttactgtagacactaatggtgtttatagtgaacctcgccccattggcacccgttaccttacccgtcccctgtaa

SEQ ID NO: 361 - protein, 736 aa, Artificial Sequence; identical to SEQ ID NO: 331
  Description of Artificial Sequence: Synthetic polypeptide

SEQ ID NO: 362 - DNA, 2211 bp, Artificial Sequence; identical to SEQ ID NO: 330
  Description of Artificial Sequence: Synthetic polynucleotide

SEQ ID NO: 363 - protein, 736 aa, Artificial Sequence; identical to SEQ ID NO: 331
  Description of Artificial Sequence: Synthetic polypeptide

SEQ ID NO: 364 - DNA, 2211 bp, Artificial Sequence
  Description of Artificial Sequence: Synthetic polynucleotide
atggctgctgacggttatcttccagattggctcgaggacaacctttctgaaggcattcgtgagtggtgggctctgaaacctggagtccctcaacccaaagcgaaccaacaacaccaggacaaccgtcggggtcttgtgcttccgggttacaaatacctcggacccggtaacggactcgacaaaggagagcccgtcaacgcggcggatgcagcggccctcgagcacgacaaggcctacgaccagcagctcaaagcgggtgacaatccgtacctgcggtataaccacgccgacgccgagtttcaggagcgtctgcaagaagatacgtcttttgggggcaacctcgggcgagcagtcttccaggccaagaagagggttctcgaaccttttggtctggttgaggaaggtgctaagacggctcctggaaagaaacgtccggtagagcagtcgccacaagagccagactcctcctcgggcatcggcaagacaggccagcagcccgctaaaaagagactcaattttggtcagactggcgactcagagtcagtccccgacccacaacctctcggagaacctccagcaacccccgctgctgtgggacctactacaatggcttcaggcggtggcgcaccaatggcagacaataacgaaggcgccgacggagtgggtaatgcctcaggaaattggcattgcgattccacatggctgggcgacagagtcatcaccaccagcacccgcacctgggccttgcccacctacaataaccacctctacaagcaaatctccagtgcttcaacgggggccagcaacgacaaccactacttcggctacagcaccccctgggggtattttgatttcaacagattccactgccatttctcaccacgtgactggcagcgactcatcaacaacaattggggattccggcccaagagactcaacttcaagctcttcaacatccaagtcaaggaggtcacgacgaatgatggcgtcacgaccatcgctaataaccttaccagcacggttcaagtcttctcggactcggagtaccagcttccgtacgtcctcggctctgcgcaccagggctgcctccctccgttcccggcggacgtgttcatgattccgcaatacggctacctgacgctcaacaatggcagccaagccgtgggacgttcatccttttactgcctggaatatttcccttctcagatgctgagaacgggcaacaactttaccttcagctacacctttgaggaagtgcctttccacagcagctacgcgcacagccagagcctggaccggctgatgaatcctctcatcgaccaatacctgtattacctgaacagaactcaaaatcagtccggaagtgcccaaaacaaggacttgctgtttagccgtgggtctccagctggcatgtctgttcagcccaaaaactggctacctggaccctgttatcggcagcagcgcgtttctaaaacaaaaacagacaacaacaacagcaattttacctggactggtgcttcaaaatataacctcaatgggcgtgaatccatcatcaaccctggcactgctatggcctcacacaaagacgacgaagacaagttctttcccatgagcggtgtcatgatttttggaaaagagagcgccggagcttcaaacactgcattggacaatgtcatgattacagacgaagaggaaattaaagccactaaccctgtggccaccgaaagatttgggaccgtggcagtcaatttccagagcagcagcacagaccctgcgaccggagatgtgcatgttatgggagccttacctggaatggtgtggcaagacagagacgtatacctgcagggtcctatttgggccaaaattcctcacacggatggacactttcacccgtctcctctcatgggcggctttggacttaagcacccgcctcctcagatcctcatcaaaaacacgcctgttcctgcgaatcctccggcagagttttcggctacaaagtttgcttcattcatcacccagtattccacaggacaagtgagcgtggagattgaatgggagctgcagaaagaaaacagcaaacgctggaatcccgaagtgcagtatacatctaactatgcaaaatctgccaacgttgatttcactgtggacaacaatggactttatactgagcctcgccccattggcacccgttacctcacccgtcccctgtaa

SEQ ID NO: 365 - protein, 736 aa, Artificial Sequence
  Description of Artificial Sequence: Synthetic polypeptide
MAADGYLPDWLEDNLSEGIREWWALKPGVPQPKANQQHQDNRRGLVLPGYKYLGPGNGLDKGEPVNAADAAALEHDKAYDQQLKAGDNPYLRYNHADAEFQERLQEDTSFGGNLGRAVFQAKKRVLEPFGLVEEGAKTAPGKKRPVEQSPQEPDSSSGIGKTGQQPAKKRLNFGQTGDSESVPDPQPLGEPPATPAAVGPTTMASGGGAPMADNNEGADGVGNASGNWHCDSTWLGDRVITTSTRTWALPTYNNHLYKQISSASTGASNDNHYFGYSTPWGYFDFNRFHCHFSPRDWQRLINNNWGFRPKRLNFKLFNIQVKEVTTNDGVTTIANNLTSTVQVFSDSEYQLPYVLGSAHQGCLPPFPADVFMIPQYGYLTLNNGSQAVGRSSFYCLEYFPSQMLRTGNNFTFSYTFEEVPFHSSYAHSQSLDRLMNPLIDQYLYYLNRTQNQSGSAQNKDLLFSRGSPAGMSVQPKNWLPGPCYRQQRVSKTKTDNNNSNFTWTGASKYNLNGRESIINPGTAMASHKDDEDKFFPMSGVMIFGKESAGASNTALDNVMITDEEEIKATNPVATERFGTVAVNFQSSSTDPATGDVHVMGALPGMVWQDRDVYLQGPIWAKIPHTDGHFHPSPLMGGFGLKHPPPQILIKNTPVPANPPAEFSATKFASFITQYSTGQVSVEIEWELQKENSKRWNPEVQYTSNYAKSANVDFTVDNNGLYTEPRPIGTRYLTRPL

SEQ ID NO: 366 - DNA, 2217 bp, Artificial Sequence
  Description of Artificial Sequence: Synthetic polynucleotide
atggctgccgatggttatcttccagattggctcgaggacaacctctctgagggcattcgcgagtggtgggacttgaaacctggagccccgaaacccaaagccaaccagcaaaagcaggacgacggccggggtctggtgcttcctggctacaagtacctcggacccttcaacggactcgacaagggggagcccgtcaacgcggcggatgcaacggccctcgagcacgacaaggcctacgaccagcagctgcaggcgggtgacaatccgtacctgcggtataaccacgccgacgccgagtttcaggagcgtctgcaagaagatacgtcttttgggggcaacctcgggcgagcagtcttccaggccaagaagcgggttctcgaacctctcggtctggttgaggaaggcgctaagacggctcctggaaagaagagaccggtagagccatcaccccagcgttctccagactcctctacgggcatcggcaagaaaggccaacagcccgccagaaaaagactcaattttggtcagactggcgactcagagtcagttccagaccctcaacctctcggagaaccaccagcagcccccacaagtttgggatctaatacaatggcttcaggcggtggcgcaccaatggcagacaataacgagggtgccgatggagtgggtaattcctcaggaaattggcattgcgattcccaatggctgggcgacagagtcatcaccaccagcacccgcacctgggccttgcccacctacaataaccacctctacaagcaaatctccagtgcttcaacgggggccagcaacgacaaccactacttcggctacagcaccccctgggggtattttgactttaaccgcttccactgccacttctcgccaagagactggcaaagactcatcaacaacaattggggattccggcccaagagactcaacttcaaactcttcaacatccaagtcaaggaggtcacgacgaatgatggcgtcacgaccatcgccaataacctcaccagcaccatccaggtgtttacggactcggagtaccagctgccgtacgttctcggctctgcccaccagggctgcctgcctccgttcccggcggacgtgttcatgattccccagtatggatacctcaccctgaacaacggaagtcaagcggtgggacgctcatccttttactgcctggagtacttcccttcgcagatgctaaggactggaaataacttccaattcagctataccttcgaggatgtaccttttcacagcagctacgctcacagccagagtttggatcgcttgatgaatcctcttattgatcagtatctgtactacctgaacagaacgcaaggaacaacctctggaacaaccaaccaatcacggctgctttttagccaggctgggcctcagtctatgtctttgcaggccagaaattggctacctgggccctgctaccggcaacagagactttcaaagactgctaacgacaacaacaacagtaactttccttggacagcagccagcaaatatcatctcaatggccgcgactcgctggtgaatccaggaccagctatggccagtcacaaggacgatgaagaaaaatttttccctatgcacggcaatctaatatttggcaaagaagggacaacggcaagtaacgcagaattagataatgtaatgattacggatgaagaagagattcgtaccaccaatcctgtggcaacagagcagtatggaactgtggcaaataacttgcagagctcaaatacagctcccacgactagaactgtcaatgatcagggggccttacctggcatggtgtggcaagatcgtgacgtgtaccttcaggggcccatctgggcaaagattccacacacggacggacattttcacccctctcccctcatgggtggattcggacttaaacaccctcctccgcagattctcatcaagaacaccccggtacctgcgaatccttcgaccaccttcagtgcggcaaagtttgcttccttcatcacacagtactccacgggacaggtcagcgtggagatcgagtgggagctgcagaaggaaaacagcaagcgctggaacccggagatccagtacacttccaactattacaagtctaataatgttgaatttgctgttaatactgaaggtgtatatagtgaaccccgccccattggcaccagatacctgactcgtaatctgtaa

SEQ ID NO: 367 - protein, 738 aa, Artificial Sequence
  Description of Artificial Sequence: Synthetic polypeptide
MAADGYLPDWLEDNLSEGIREWWDLKPGAPKPKANQQKQDDGRGLVLPGYKYLGPFNGLDKGEPVNAADATALEHDKAYDQQLQAGDNPYLRYNHADAEFQERLQEDTSFGGNLGRAVFQAKKRVLEPLGLVEEGAKTAPGKKRPVEPSPQRSPDSSTGIGKKGQQPARKRLNFGQTGDSESVPDPQPLGEPPAAPTSLGSNTMASGGGAPMADNNEGADGVGNSSGNWHCDSQWLGDRVITTSTRTWALPTYNNHLYKQISSASTGASNDNHYFGYSTPWGYFDFNRFHCHFSPRDWQRLINNNWGFRPKRLNFKLFNIQVKEVTTNDGVTTIANNLTSTIQVFTDSEYQLPYVLGSAHQGCLPPFPADVFMIPQYGYLTLNNGSQAVGRSSFYCLEYFPSQMLRTGNNFQFSYTFEDVPFHSSYAHSQSLDRLMNPLIDQYLYYLNRTQGTTSGTTNQSRLLFSQAGPQSMSLQARNWLPGPCYRQQRLSKTANDNNNSNFPWTAASKYHLNGRDSLVNPGPAMASHKDDEEKFFPMHGNLIFGKEGTTASNAELDNVMITDEEEIRTTNPVATEQYGTVANNLQSSNTAPTTRTVNDQGALPGMVWQDRDVYLQGPIWAKIPHTDGHFHPSPLMGGFGLKHPPPQILIKNTPVPANPSTTFSAAKFASFITQYSTGQVSVEIEWELQKENSKRWNPEIQYTSNYYKSNNVEFAVNTEGVYSEPRPIGTRYLTRNL

SEQ ID NO: 368 - DNA, 2208 bp, Artificial Sequence
  Description of Artificial Sequence: Synthetic polynucleotide
atggctgccgatggttatcttccagattggctcgaggacaaccttagtgaaggaattcgcgagtggtgggacttgaaacctggagccccgaagcccaaagccaaccagcaaaagcaggacgacggccggggtctggtgcttcctggctacaagtacctcggacccttcaacggactcgacaagggggagcccgtcaacgcggcggacgcagcggccctcgagcacgacaaggcctacgaccagcagctcaaagcgggtgacaatccgtacctgcggtataaccacgccgacgccgagtttcaggagcgtctgcaagaagatacgtcttttgggggcaacctcgggcgagcagtcttccaggccaagaagcgggttctcgaacctctcggtctggttgaggaaggtgctaagacggctcctggaaagaaacgtccggtagagcagtcgccacaagagccagactcctcctcgggcattggcaagacaggccagcagcccgctaaaaagagactcaattttggtcagactggcgactcagagtcagtccccgacccacaacctctcggagaacctccagcaacccccgctgctgtgggacctactacaatggcttcaggcggtggcgcaccaatggcagacaataacgaaggcgccgacggagtgggtaatgcctcaggaaattggcattgcgattccacatggctgggcgacagagtcatcaccaccagcacccgaacctgggccctgcccacctacaacaaccacctctacaaacaaatttccagccaatcaggagcctcgaacgacaatcactactttggctacagcaccccttgggggtattttgatttcaacagattccactgccacttttcaccacgtgactggcagcgactcatcaacaacaattggggattccggcccaagagactcagcttcaagctcttcaacatccaggtcaaggaggtcacgcagaatgaaggcaccaagaccatcgccaataaccttaccagcacggttcaagtgtttacggactcggagtatcagctcccgtacgtgctcggctcggcgcatcaaggatgcctcccgccgttcccagcagacgtcttcatggtgccacagtatggatacctcaccctgaacaacgggagtcaggcagtaggacgctcttcattttactgcctggagtactttccttctcagatgctgcgtaccggaaacaactttaccttcagctacacttttgaggacgttcctttccacagcagctacgctcacagccagagtctggaccgtctcatgaatcctctgattgaccagtacctgtattacttgagcagaacaaacactccaagtggaaccaccacgcagtcaaggcttcagttttctcaggccggagcgagtgacattcgggaccagtctaggaactggcttcctggaccctgttaccgccagcagcgagtatcaaagacatctgcggataacaacaacagtgaatactcgtggactggagctaccaagtaccacctcaatggcagagactctctggtgaatccgggcccggccatggcaagccacaaggactatgaagaaaagttttttcctcagagcggggttctcatctttgggaagcaaggctcagagaaaacaaatgtggacattgaaaaggtcatgattacagacgaagaggaaatcaggacaaccaatcccgtggctacggagcagtatggttctgtatctaccaacctccagagaggcaacagacaagcagctaccgcagatgtcaacacacaaggcgttcttccaggcatggtctggcaggacagagatgtgtaccttcaggggcccatctgggcaaagattccacacacggacggacattttcacccgtctccgctgatgggcggctttggcctgaaacatcctccgcctcagatcctgatcaagaacacgcctgtacctgcggatcctccgaccaccttcaaccagtcaaagctgaactctttcatcactcagtattctactggccaagtcagcgtggagatcgagtgggagctgcagaaggaaaacagcaagcgctggaaccccgagatccagtacacctccaactactacaaatctacaagtgtggactttgctgttaatacagaaggcgtgtactctgaaccccgccccattggcacccgttacctcacccgtaatctgtaa

SEQ ID NO: 369 - protein, 735 aa, Artificial Sequence
  Description of Artificial Sequence: Synthetic polypeptide
MAADGYLPDWLEDNLSEGIREWWDLKPGAPKPKANQQKQDDGRGLVLPGYKYLGPFNGLDKGEPVNAADAAALEHDKAYDQQLKAGDNPYLRYNHADAEFQERLQEDTSFGGNLGRAVFQAKKRVLEPLGLVEEGAKTAPGKKRPVEQSPQEPDSSSGIGKTGQQPAKKRLNFGQTGDSESVPDPQPLGEPPATPAAVGPTTMASGGGAPMADNNEGADGVGNASGNWHCDSTWLGDRVITTSTRTWALPTYNNHLYKQISSQSGASNDNHYFGYSTPWGYFDFNRFHCHFSPRDWQRLINNNWGFRPKRLSFKLFNIQVKEVTQNEGTKTIANNLTSTVQVFTDSEYQLPYVLGSAHQGCLPPFPADVFMVPQYGYLTLNNGSQAVGRSSFYCLEYFPSQMLRTGNNFTFSYTFEDVPFHSSYAHSQSLDRLMNPLIDQYLYYLSRTNTPSGTTTQSRLQFSQAGASDIRDQSRNWLPGPCYRQQRVSKTSADNNNSEYSWTGATKYHLNGRDSLVNPGPAMASHKDYEEKFFPQSGVLIFGKQGSEKTNVDIEKVMITDEEEIRTTNPVATEQYGSVSTNLQRGNRQAATADVNTQGVLPGMVWQDRDVYLQGPIWAKIPHTDGHFHPSPLMGGFGLKHPPPQILIKNTPVPADPPTTFNQSKLNSFITQYSTGQVSVEIEWELQKENSKRWNPEIQYTSNYYKSTSVDFAVNTEGVYSEPRPIGTRYLTRNL

SEQ ID NO: 370 - DNA, 2214 bp, Artificial Sequence
  Description of Artificial Sequence: Synthetic polynucleotide
atggctgccgatggttatcttccagattggctcgaggacaacctctctgagggcattcgcgagtggtgggacttgaaacctggagccccgaaacccaaagccaaccagcaaaagcaggacgacggccggggtctggtgcttcctggctacaagtacctcggacccttcaacggactcgacaagggggagcccgtcaacgcggcggatgcagcggccctcgagcacgacaaggcctacgaccagcagctcaaagcgggtgacaatccgtacctgcggtataaccacgccgacgccgagtttcaggagcgtctgcaagaagatacgtcttttgggggcaacctcgggcgagcagtcttccaggccaagaagagggttctcgaaccttttggtctggttgaggaaggtgctaagacggctcctggaaagaaacgtccggtagagcagtcgccacaagagccagactcctcctcgggcattggcaagacaggccagcagcctgcaagaaaaagattgaattttggtcagactggagacgcagactcagtacctgacccccagcctctcggacagccaccagcagccccctctggtctgggaactaatacgatggctacaggcagtggcgcaccaatggcagacaataacgagggcgccgacggagtgggtaattcctcgggaaattggcattgcgattcccaatggctgggggacagagtcatcaccaccagcacccgaacctgggccctgcccacctacaacaatcacctctacaagcaaatctccaacagcacatctggaggatcttcaaatgacaacgcctacttcggctacagcaccccctgggggtattttgatttcaacagattccactgccatttctcaccacgtgactggcagcgactcatcaacaacaattggggattccggcccaagagactcaacttcaagctcttcaacatccaggtcaaggaggtcacgcagaatgaaggcaccaagaccatcgccaataacctcaccagcaccatccaggtgtttacggactcggagtaccagctgccgtacgttctcggctctgcccaccagggctgcctgcctccgttcccggcggacgtgttcatgattccccagtacggctacctaacactcaacaacggtagtcaggccgtgggacgctcctccttctactgcctggaatactttccttcgcagatgctgagaaccggcaacaacttccagtttacttacaccttcgaggacgtgcctttccacagcagctacgcccacagccagagcttggaccggctgatgaatcctctgattgaccagtacctgtactacttgtctcggactcaaacaacaggaggcacgacaaatacgcagactctgggcttcagccaaggtgggcctaatacaatggccaatcaggcaaagaactggctgccaggaccctgttaccgccagcagcgagtatcaaagacatttgcggataacaacaacagtgaatactcgtggactggagctaccaagtaccacctcaatggcagagactctctggtgaatccgggcccggccatggcaagccacaaggacgatgaagaaaagttttttcctcagagcggggttctcatctttgggaagcaaggctcagagaaaacaaatgtggacattgaaaaggtcatgattacagacgaagaggaaatcaggacaaccaatcccgtggctacggagcagtatggttctgtatctaccaacctccagagaggcaacagacaagcagctaccgcagatgtcaacacacaaggcgttcttccaggcatggtctggcaggacagagatgtgtaccttcaggggcccatctgggcaaagattccacacacggacggacattttcacccctctcccctcatgggtggattcggacttaaacaccctccgcctcagatcctgatcaagaacacgcctgtacccgcggatcctccgaccaccttcaaccagtcaaagctgaactctttcatcacccagtattctactggccaagtcagcgtggagatcgagtgggagctgcagaaggaaaacagcaagcgctggaaccccgagatccagtacacctccaactactacaaatctacaagtgtggactttgctgttaatacagaaggcgtgtactctgaaccccgccccattggcacccgttacctcacccgtaatctgtaa

SEQ ID NO: 371 - protein, 737 aa, Artificial Sequence
  Description of Artificial Sequence: Synthetic polypeptide
MAADGYLPDWLEDNLSEGIREWWDLKPGAPKPKANQQKQDDGRGLVLPGYKYLGPFNGLDKGEPVNAADAAALEHDKAYDQQLKAGDNPYLRYNHADAEFQERLQEDTSFGGNLGRAVFQAKKRVLEPFGLVEEGAKTAPGKKRPVEQSPQEPDSSSGIGKTGQQPARKRLNFGQTGDADSVPDPQPLGQPPAAPSGLGTNTMATGSGAPMADNNEGADGVGNSSGNWHCDSQWLGDRVITTSTRTWALPTYNNHLYKQISNSTSGGSSNDNAYFGYSTPWGYFDFNRFHCHFSPRDWQRLINNNWGFRPKRLNFKLFNIQVKEVTQNEGTKTIANNLTSTIQVFTDSEYQLPYVLGSAHQGCLPPFPADVFMIPQYGYLTLNNGSQAVGRSSFYCLEYFPSQMLRTGNNFQFTYTFEDVPFHSSYAHSQSLDRLMNPLIDQYLYYLSRTQTTGGTTNTQTLGFSQGGPNTMANQAKNWLPGPCYRQQRVSKTFADNNNSEYSWTGATKYHLNGRDSLVNPGPAMASHKDDEEKFFPQSGVLIFGKQGSEKTNVDIEKVMITDEEEIRTTNPVATEQYGSVSTNLQRGNRQAATADVNTQGVLPGMVWQDRDVYLQGPIWAKIPHTDGHFHPSPLMGGFGLKHPPPQILIKNTPVPADPPTTFNQSKLNSFITQYSTGQVSVEIEWELQKENSKRWNPEIQYTSNYYKSTSVDFAVNTEGVYSEPRPIGTRYLTRNL

SEQ ID NO: 372 - DNA, 2217 bp, Artificial Sequence
  Description of Artificial Sequence: Synthetic polynucleotide
atggctgccgatggttatcttccagattggctcgaggacactctctctgaaggaataagacagtggtgggcgctgaaacctggagccccgaagcccaaagccaaccagcaaaagcaggacgacggccggggtctggtgcttcctggctacaagtacctcggacccttcaacggactcgacaagggggagcccgtcaacgcggcggatgcagcggccctcgagcacgacaaggcctacgaccagcagctcaaagcgggtgacaatccgtacctgcggtataaccacgccgacgccgagtttcaggagcgtctgcaagaagatacgtcttttgggggcaacctcgggcgagcagtcttccaggccaagaagcgggttctcgaacctctcggtctggttgaggaaggcgctaagacggctcctggaaagaagagaccggtagagccatcaccccagcgttctccagactcctctacgggcatcggcaagaaaggccaacagcccgccagaaaaagactcaattttggtcagactggcgactcagagtcagttccagaccctcaacctctcggagaaccaccagcagcccccacaagtttgggatctaatacaatggcttcaggcggtggcgcaccaatggcagacaataacgagggtgccgatggagtgggtaattcctcaggaaattggcattgcgattcccaatggctgggcgacagagtcatcaccaccagcacccgcacctgggccttgcccacctacaataaccacctctacaagcaaatctccagtgcttcaacgggggccagcaacgacaaccactacttcggctacagcaccccctgggggtattttgactttaaccgcttccactgccacttctcgccaagagactggcaaagactcatcaacaacaattggggattccggcccaagagactcaacttcaaactcttcaacatccaagtcaaggaggtcacgacgaatgatggcgtcacgaccatcgccaataacctcaccagcaccatccaggtgtttacggactcggagtaccagctgccgtacgttctcggctctgcccaccagggctgcctgcctccgttcccggcggacgtgttcatgattccccagtatggatacctcaccctgaacaacggaagtcaagcggtgggacgctcatccttttactgcctggagtacttcccttcgcagatgctaaggactggaaataacttccaattcagctataccttcgaggatgtaccttttcacagcagctacgctcacagccagagtttggatcgcttgatgaatcctcttattgatcagtatctgtactacctgaacagaacgcaaggaacaacctctggaacaaccaaccaatcacggctgctttttagccaggctgggcctcagtctatgtctttgcaggccagaaattggctacctgggccctgctaccggcaacagagactttcaaagactgctaacgacaacaacaacagtaactttccttggacagcagccagcaaatatcatctcaatggccgcgactcgctggtgaatccaggaccagctatggccagtcacaaggacgatgaagaaaaatttttccctatgcacggcaatctaatatttggcaaagaagggacaacggcaagtaacgcagaattagataatgtaatgattacggatgaagaagagattcgtaccaccaatcctgtggcaacagagcagtatggaactgtggcaaataacttgcagagctcaaatacagctcccacgactagaactgtcaatgatcagggggccttacctggcatggtgtggcaagatcgtgacgtgtaccttcaggggcccatctgggcaaagattccacacacggacggacattttcacccctctcccctcatgggtggattcggacttaaacaccctcctccgcagattctcatcaagaacaccccggtacctgcgaatccttcgaccaccttcagtgcggcaaagtttgcttccttcatcacacagtactccacgggacaggtcagcgtggagatcgagtgggagctgcagaaggaaaacagcaagcgctggaacccggagatccagtacacttccaactattacaagtctaataatgttgaatttgctgttaatactgaaggtgtatatagtgaaccccgccccattggcaccagatacctgactcgtaatctgtaa

SEQ ID NO: 373 - protein, 738 aa, Artificial Sequence
  Description of Artificial Sequence: Synthetic polypeptide
MAADGYLPDWLEDTLSEGIRQWWALKPGAPKPKANQQKQDDGRGLVLPGYKYLGPFNGLDKGEPVNAADAAALEHDKAYDQQLKAGDNPYLRYNHADAEFQERLQEDTSFGGNLGRAVFQAKKRVLEPLGLVEEGAKTAPGKKRPVEPSPQRSPDSSTGIGKKGQQPARKRLNFGQTGDSESVPDPQPLGEPPAAPTSLGSNTMASGGGAPMADNNEGADGVGNSSGNWHCDSQWLGDRVITTSTRTWALPTYNNHLYKQISSASTGASNDNHYFGYSTPWGYFDFNRFHCHFSPRDWQRLINNNWGFRPKRLNFKLFNIQVKEVTTNDGVTTIANNLTSTIQVFTDSEYQLPYVLGSAHQGCLPPFPADVFMIPQYGYLTLNNGSQAVGRSSFYCLEYFPSQMLRTGNNFQFSYTFEDVPFHSSYAHSQSLDRLMNPLIDQYLYYLNRTQGTTSGTTNQSRLLFSQAGPQSMSLQARNWLPGPCYRQQRLSKTANDNNNSNFPWTAASKYHLNGRDSLVNPGPAMASHKDDEEKFFPMHGNLIFGKEGTTASNAELDNVMITDEEEIRTTNPVATEQYGTVANNLQSSNTAPTTRTVNDQGALPGMVWQDRDVYLQGPIWAKIPHTDGHFHPSPLMGGFGLKHPPPQILIKNTPVPANPSTTFSAAKFASFITQYSTGQVSVEIEWELQKENSKRWNPEIQYTSNYYKSNNVEFAVNTEGVYSEPRPIGTRYLTRNL

SEQ ID NO: 374 - DNA, 2208 bp, Artificial Sequence; identical to SEQ ID NO: 10
  Description of Artificial Sequence: Synthetic polynucleotide

SEQ ID NO: 375 - protein, 735 aa, Artificial Sequence [sequence omitted]

SEQ ID NO: 376 - DNA, 2208 bp, Artificial Sequence
  Description of Artificial Sequence: Synthetic polynucleotide
atggctgccgatggttatcttccagattggctcgaggacaacctctctgagggcattcgcgagtggtgggcgctgaaacctggagccccgaagcccaaagccaaccagcaaaagcaggacgacggccggggtctggtgcttcctggctacaagtacctcggacccttcaacggactcgacaagggggagcccgtcaacgcggcggacgccgcggccctcgagcacgacaaggcctacgaccagcagctgcaggcgggtgacaatccgtacctgcggtataaccacgccgacgccgagtttcaggagcgtctgcaagaagatacgtcttttgggggcaacctcgggcgagcagtcttccaggccaaaaagaggcttcttgaacctcttggtctggttgaggaagcagctaaaacggctcctggaaagaagaggcctgtagagcagtctcctcaggaaccggactcctccgcgggtattggcaaatcgggtgcacagcccgccaaaaagagactcaatttcggtcagactggcgactcagagtcagtcccagaccctcaacctctcggagaaccaccagcagcccccacaagtttgggatctaatacaatggcttcaggcggtggcgcaccaatggcagacaataacgaaggcgccgacggagtgggtaatgcctcaggaaattggcattgcgattccacatggctgggcgacagagtcatcaccaccagcacccgcacctgggccttgcccacctacagcaaccatctctacaagcaaatctccagccaatcaggagcttcaaacgacaacgactactttggctacagcaccccttgggggtattttgatttcaacagattccactgccacttttcaccacgtgactggcaaagactcatcaacaacaactggggattccgacccaagagactcaacttcaagctctttaacattcaagtcaaagaggtcacgcagaatgacggtacgacgacgattgccaataaccttaccagcacggttcaggtgtttactgactcggagtaccagctcccgtacgtcctcggctcggcgcatcaaggatgcctcccgccgttcccagcagacgtcttcatggtgccacagtatggatacctcaccctgaacaacgggagtcaggcagtaggacgctcttcattttactgcctggagtactttccttctcagatgctgcgtaccggaaacaactttaccttcagctacacttttgaggacgttcctttccacagcagctacgctcacagccagagtctggaccgtctcatgaatcctctcatcgaccagtacctgtattacttgagcagaacaaacactccaagtggaaccaccacgcagtcaaggcttcagttttctcaggccggagcgagtgacattcgggaccagtctaggaactggcttcctggaccctgttaccgccagcagcgagtatcaaagacatctgaggataacaacaacagtgaatactcgtggactggagctaccaagtaccacctcaatggcagagactctctggtgaatccgggcccggccatggcaagccacaaggacgatgaagaaaagttttttcctcagagcggggttctcatctttgggaagcaaggctcagagaaaacaaatgtggacattgaaaaggtcatgattacagacgaagaggaaatcaggacaaccaatcccgtggctacggagcagtatggttctgtatctaccaacctccagagaggcaacagacaagcagctaccgcagatgtcaacacacaaggcgttcttccaggcatggtctggcaggacagagatgtgtaccttcaggggcccatctgggcaaagattccacacacggacggacattttcacccctctcccctcatgggtggattcggacttaaacaccctcctccacagattctcatcaagaacaccccggtacctgcgaatccttcgaccaccttcagtgcggcaaagtttgcttccttcatcacacagtactccacgggacaggtcagcgtggagatcgagtgggagctgcagaaggaaaacagcaaacgctggaatcccgaaattcagtacacttccaactacaacaagtctgttaatgtggactttactgtggacactaatggcgtgtattcagagcctcgccccattggcaccagatacctgactcgtaatctgtaa

SEQ ID NO: 377 - protein, 735 aa, Artificial Sequence
  Description of Artificial Sequence: Synthetic polypeptide
MAADGYLPDWLEDNLSEGIREWWALKPGAPKPKANQQKQDDGRGLVLPGYKYLGPFNGLDKGEPVNAADAAALEHDKAYDQQLQAGDNPYLRYNHADAEFQERLQEDTSFGGNLGRAVFQAKKRLLEPLGLVEEAAKTAPGKKRPVEQSPQEPDSSAGIGKSGAQPAKKRLNFGQTGDSESVPDPQPLGEPPAAPTSLGSNTMASGGGAPMADNNEGADGVGNASGNWHCDSTWLGDRVITTSTRTWALPTYSNHLYKQISSQSGASNDNDYFGYSTPWGYFDFNRFHCHFSPRDWQRLINNNWGFRPKRLNFKLFNIQVKEVTQNDGTTTIANNLTSTVQVFTDSEYQLPYVLGSAHQGCLPPFPADVFMVPQYGYLTLNNGSQAVGRSSFYCLEYFPSQMLRTGNNFTFSYTFEDVPFHSSYAHSQSLDRLMNPLIDQYLYYLSRTNTPSGTTTQSRLQFSQAGASDIRDQSRNWLPGPCYRQQRVSKTSEDNNNSEYSWTGATKYHLNGRDSLVNPGPAMASHKDDEEKFFPQSGVLIFGKQGSEKTNVDIEKVMITDEEEIRTTNPVATEQYGSVSTNLQRGNRQAATADVNTQGVLPGMVWQDRDVYLQGPIWAKIPHTDGHFHPSPLMGGFGLKHPPPQILIKNTPVPANPSTTFSAAKFASFITQYSTGQVSVEIEWELQKENSKRWNPEIQYTSNYNKSVNVDFTVDTNGVYSEPRPIGTRYLTRNL

SEQ ID NO: 378 - DNA, 2208 bp, Artificial Sequence
  Description of Artificial Sequence: Synthetic polynucleotide
atggctgccgatggttatcttccagattggctcgaggacaacctctctgagggcattcgcgagtggtgggcgctgaaacctggagccccgaagcccaaagccaaccagcaaaagcaggacgacggccggggtctggtgcttcctggctacaagtacctcggacccttcaacggactcgacaagggggagcccgtcaacgcggcggacgcagcggccctcgagcacgacaaggcctacgaccagcagctgcaggcgggtgacaatccgtacctgcggtataaccacgccgacgccgagttccaggagcgtctgcaagaagatacgtcttttgggggcaacctcgggcgagcagtcttccaggccaagaagagggttctcgaaccttttggtctggttgaggaaggtgctaagacggctcctggaaagaaacgtccggtagagcagtcgccacaagagccagactcctcctcgggcattggcaagacaggccagcagcccgctaaaaagagactcaattttggtcagactggcgactcagagtcagtcccagaccctcaacctctcggagaaccaccagcagcccccacaagtttgggatctaatacaatggcttcaggcggtggcgcaccaatggcagacaataacgagggcgccgacggagtgggtaattcctcgggaaattggcattgcgattccacatggatgggcgacagagtcatcaccaccagcacccgaacctgggccctgcccacctacaacaaccacctctacaaacaaatttccagccaatcaggagcttcaaacgacaaccactactttggctacagcaccccttgggggtattttgactttaacagattccactgccacttttcaccacgtgactggcagcgactcattaacaacaactggggattccggcccaagaaactcaacttcaagctctttaacatccaggtcaaggaggtcacgcagaatgaaggcaccaagaccatcgccaataacctcaccagcaccatccaggtgtttacggactcggagtaccagctgccgtacgttctcggctctgcccaccagggctgcctgcctccgttcccggcggacgtgttcatgattccccagtacggctacctaacactcaacaacggtagtcaggccgtgggacgctcctccttctactgcctggaatactttccttcgcagatgctgagaaccggcaacaacttccagtttacttacaccttcgaggacgtgcctttccacagcagctacgcccacagccagagcttggaccggctgatgaatcctctgattgaccagtacctgtattacttgtctcggactcaaacaacaggaggcacgacaaatacgcagactctgggcttcagccaaggtgggcctaatacaatggccaatcaggcaaagaactggctgcctggaccctgttaccgccagcagcgagtatcaaagacatctgcggataacaacaacagtgaatactcgtggactggagctaccaagtaccacctcaatggcagagactctctggtgaatccgggcccggccatggcaagccacaaggacgatgaagaaaagttttttcctcagagcggggttctcatctttgggaagcaaggctcagagaaaacaaatgtggacattgaaaaggttatgattacagacgaagaggaaatcaggacaaccaatcccgtggctacggagcagtatggttctgtatctaccaacctccagagaggcaacagacaagcagctaccgcagatgtcaacacacagggcgttcttccaggcatggtctggcaggacagagatgtgtaccttcagggtcccatttgggccaaaattcctcacacagatggacactttcacccgtcccctcttatgggcggctttggactcaagaacccgcctcctcagatcctcatcaaaaacacgcctgttcctgcgaatcctccggcagagttttcagctacaaagtttgcttcattcatcacccaatactccacaggacaagtgagtgtggaaattgaatgggagctgcagaaagaaaacagcaagcgctggaatcccgaagtgcagtacacatccaattatgcaaaatctgccaacgttgattttactgtggacactaatggcgtgtattcagagcctcgccccattggcaccagatacctcacccgtaatctgtaa

SEQ ID NO: 379 - protein, 735 aa, Artificial Sequence
  Description of Artificial Sequence: Synthetic polypeptide
MAADGYLPDWLEDNLSEGIREWWALKPGAPKPKANQQKQDDGRGLVLPGYKYLGPFNGLDKGEPVNAADAAALEHDKAYDQQLQAGDNPYLRYNHADAEFQERLQEDTSFGGNLGRAVFQAKKRVLEPFGLVEEGAKTAPGKKRPVEQSPQEPDSSSGIGKTGQQPAKKRLNFGQTGDSESVPDPQPLGEPPAAPTSLGSNTMASGGGAPMADNNEGADGVGNSSGNWHCDSTWMGDRVITTSTRTWALPTYNNHLYKQISSQSGASNDNHYFGYSTPWGYFDFNRFHCHFSPRDWQRLINNNWGFRPKKLNFKLFNIQVKEVTQNEGTKTIANNLTSTIQVFTDSEYQLPYVLGSAHQGCLPPFPADVFMIPQYGYLTLNNGSQAVGRSSFYCLEYFPSQMLRTGNNFQFTYTFEDVPFHSSYAHSQSLDRLMNPLIDQYLYYLSRTQTTGGTTNTQTLGFSQGGPNTMANQAKNWLPGPCYRQQRVSKTSADNNNSEYSWTGATKYHLNGRDSLVNPGPAMASHKDDEEKFFPQSGVLIFGKQGSEKTNVDIEKVMITDEEEIRTTNPVATEQYGSVSTNLQRGNRQAATADVNTQGVLPGMVWQDRDVYLQGPIWAKIPHTDGHFHPSPLMGGFGLKNPPPQILIKNTPVPANPPAEFSATKFASFITQYSTGQVSVEIEWELQKENSKRWNPEVQYTSNYAKSANVDFTVDTNGVYSEPRPIGTRYLTRNL

SEQ ID NO: 380 - DNA, 2214 bp, Artificial Sequence; identical to SEQ ID NO: 370
  Description of Artificial Sequence: Synthetic polynucleotide

SEQ ID NO: 381 - protein, 737 aa, Artificial Sequence; identical to SEQ ID NO: 371
  Description of Artificial Sequence: Synthetic polypeptide

SEQ ID NO: 382 - DNA, 2196 bp, Adeno-associated virus
atggctgctgacggttatcttccagattggctcgaggacaacctctctgagggcattcgcgagtggtgggcgctgaaacctggagccccgcaacccaaagccaaccagcaaaagcaggacgacggccggggtctggtgcttcctggctacaagtacctcggacccttcaacggactcgacaagggggagcccgtcaacgaggcggacgccgcggccctcgagcacgacaaggcctacgaccagcagctcaaagcgggtgacaatccgtacctgcggtataatcacgccgacgccgagtttcaagagcgtctgcaagaagatacgtcctttgggggcaacctcgggcgagcagtcttccaggccaaaaagagggtactcgagcctctgggtctggttgaggaaggcgctaagacggctcctggaaagaagcggccagtagaaccggactccagctcgggcatcggcaagtcaggccagcagcccgcgaaaaagagactgaattttgggcagactggcgactcagagtcagtgcctgacccccaacctctctcagaaccacccgcaggtccctctggtctgggatctggtacaatggctgctggcggtggcgctccaatggcagacaataacgaaggcgccgacggagtgggtaatgtctcaggaaattggcattgcgattccacatggctgggcgaccgagtcatcaccaccagcactcggacctgggccctccccacctacaacaaccacctctacaagcaaatctccaacgggacctcgggaggcagcagcaacgacaacacctactttggctacagcaccccctgggggtattttgactttaacagattccactgccacttttcaccacgtgactggcagcgactcatcaacaacaactgggggttccggcccaagaagctcaacttcaagctcttcaacatccaggtcaaggaggtcacccagaatgaaggcaccaagaccatcgccaataacctcaccagcacggtgcaggtctttacggactcggagtaccagctcccgtacgtgctcggctctgcccaccagggctgcctgcctccgttcccggcggacgtgttcatgattccgcagtacgggtacctgacgctgaacaacgggagccaggccgtggggcgatcctccttctactgcctggagtactttccctcgcagatgctgagaacgggcaacaactttaccttcagctacaccttcgaggacgtgcccttccacagcagctacgcgcacagccagagcctggaccggctgatgaacccgctgattgaccagtacctgtactacctgtctcggactcagaccaacgggaccaatgccacgcagactctgttgtttgctcaggccgggcctcagaacatgtcggctcaggccaagaactggctgcctggtccttgctatcggcagcagcgcgtctctacgacagtgtcgcaaaacaacaacagcaactttacctggaccggggcgaccaagtaccacctgaacggccgagactccctggtgagccccggtgtcgccatggcaacgcacaaggacgacgaggagcgcttcttcccgagcagcggggtcctgatgtttggcaagcagggcgctggaaaggacaatgtcgagtacaccaacgtgatgctcaccagcgaggaggagatcaagaccaccaaccctgtggccacggagcagtacggcgtggtggctgacaatctgcagcagaccaactcagctcccattgtgggggcagtcaacagccagggggccttacccggtatggtctggcagaaccgggacgtgtacctgcagggtcccatctgggccaagatcccgcatacggacggcaactttcacccgtctcctctcatgggcggctttggactgaaacacccgcctccccagatcctgatcaaaaacacgccggtacctgcggatcccccggtgaactttacggacgctaagctggcgagtttcatcacgcagtacagcaccgggcaggtcagcgtggagattgagtgggagctgcagaaggagaacagcaagcgctggaatcccgagattcagtacacttccaattattataaatcagctaatgtggactttgccgtcaatgcagatggtgtatatagtgaaccccgccccattggcactcgttacctcacccgtaatctgtaa

SEQ ID NO: 383 - protein, 731 aa, Adeno-associated virus
MAADGYLPDWLEDNLSEGIREWWALKPGAPQPKANQQKQDDGRGLVLPGYKYLGPFNGLDKGEPVNEADAAALEHDKAYDQQLKAGDNPYLRYNHADAEFQERLQEDTSFGGNLGRAVFQAKKRVLEPLGLVEEGAKTAPGKKRPVEPDSSSGIGKSGQQPAKKRLNFGQTGDSESVPDPQPLSEPPAGPSGLGSGTMAAGGGAPMADNNEGADGVGNVSGNWHCDSTWLGDRVITTSTRTWALPTYNNHLYKQISNGTSGGSSNDNTYFGYSTPWGYFDFNRFHCHFSPRDWQRLINNNWGFRPKKLNFKLFNIQVKEVTQNEGTKTIANNLTSTVQVFTDSEYQLPYVLGSAHQGCLPPFPADVFMIPQYGYLTLNNGSQAVGRSSFYCLEYFPSQMLRTGNNFTFSYTFEDVPFHSSYAHSQSLDRLMNPLIDQYLYYLSRTQTNGTNATQTLLFAQAGPQNMSAQAKNWLPGPCYRQQRVSTTVSQNNNSNFTWTGATKYHLNGRDSLVSPGVAMATHKDDEERFFPSSGVLMFGKQGAGKDNVEYTNVMLTSEEEIKTTNPVATEQYGVVADNLQQTNSAPIVGAVNSQGALPGMVWQNRDVYLQGPIWAKIPHTDGNFHPSPLMGGFGLKHPPPQILIKNTPVPADPPVNFTDAKLASFITQYSTGQVSVEIEWELQKENSKRWNPEIQYTSNYYKSANVDFAVNADGVYSEPRPIGTRYLTRNL

SEQ ID NO: 384 - DNA, 2196 bp, Adeno-associated virus
atggctgctgacggttatcttccagattggctcgaggacaacctctctgagggcattcgcgagtggtgggcgctgaaacctggagccccgcaacccaaagccaaccagcaaaagcaggacgacggccggggtctggtgcttcctggctacaagtacctcggacccttcaacggactcgacaagggggagcccgtcaacgaggcggacgccgcggccctcgagcacgacaaggcctacgaccagcagctcaaagcgggtgacaatccgtacctgcggtataatcacgccgacgccgagtttcaagagcgtctgcaagaagatacgtcctttgggggcaacctcgggcgagcagtcttccaggccaaaaagagggtactcgagcctctgggtctggttgaggaaggcgctaagacggctcctggaaagaagcggccagtagaaccggactccagctcgggcatcggcaagtcaggccggcagcccgcgaaaaagagactgaattttgggcagactggcgactcagagtcagtgcctgacccccaacctctctcagaaccacccgcaggtccctctggtctgggatctggtacaatggctgcaggcggtggcgctccaatggcagacaataacgaaggcgccgacggagtgggtaatgcctcaggaaattggcattgcgattccacatggctgggcgaccgagtcatcaccaccagcactcggacctgggccctccccacctacaacaaccacctctacaagcaaatctccaacgggacctcgggaggcagcagcaacgacaacacctactttggctacagcaccccctgggggtattttgactttaacagattccactgccacttttcaccacgtgactggcagcgactcatcaacaacaactggggattccggcccaagaggctcaacttcaagctcttcaacatccaggtcaaggaggtcacccagaatgaaggcaccaagaccatcgccaataacctcaccagcacggtgcaggtctttacggactcgaagtaccagctcccgtacgtgctcggctctgcccaccagggctgcctgcctccgttcccggcggacgtgttcatgattccgcagtacgggtacctgacgctgaacaacgggagccaggccgtggggcgatcctccttctactgcctggagtactttccctcgcagatgctgagaacgggcaacaactttaccttcagctacaccttcgaggacgtgcccttccacagcagctacgcgcacagccagagcctggaccggctgatgaacccgctgattgaccagtacctgtactacctgtctcggactcagaccaacgggaccaatgccacgcagactctgttgtttgctcaggccgggcctcagaacatgtcggctcaggccaagaactggctgcctggtccttgctatcggcagcagcgcgtctctacgacagtgtcgcaaaacaacaacagcaactttacctggaccggggcgaccaagtaccacctgaacggccgagactccctggtgaaccccggtgtcgccatggcaacgcacaaggacgacgaggagcgcttcttcccgagcagcggggtcctgatgtttggcaagcagggcgctggaaaggacaatgtcgagtacaccaacgtgatgctcaccagcgaggaggagatcaagaccaccaaccctgtggccacggagcagtacggtgtggtggctgacaatctgcagcagaccaactcggctcccattgtgggggcagtcaacagccagggggccttacccggtatggtctggcagaaccgggacgtgtacctgcagggtcccatctgggccaagatcccgcatacggacggcaactttcacccgtctcctctcatgggcggctttggactgaaacacccgcctccccagatcctgatcaaaaacacgccggtacctgcggatcccccggtgaactttacggacgctaagctggcgagtttcatcacgcagtacagcaccgggcaggtcagcgtggagattgagtgggagctgcagaaggagaacagcaagcgctggaatcccgagattcagtacacttccaattattataaatcagctaatgtggactttgccgtcaatgcagatggtgtatatagtgaaccccgccccattggcactcgttacctcacccgtaatctgtaa

SEQ ID NO: 385 - protein, 731 aa, Adeno-associated virus
MAADGYLPDWLEDNLSEGIREWWALKPGAPQPKANQQKQDDGRGLVLPGYKYLGPFNGLDKGEPVNEADAAALEHDKAYDQQLKAGDNPYLRYNHADAEFQERLQEDTSFGGNLGRAVFQAKKRVLEPLGLVEEGAKTAPGKKRPVEPDSSSGIGKSGRQPAKKRLNFGQTGDSESVPDPQPLSEPPAGPSGLGSGTMAAGGGAPMADNNEGADGVGNASGNWHCDSTWLGDRVITTSTRTWALPTYNNHLYKQISNGTSGGSSNDNTYFGYSTPWGYFDFNRFHCHFSPRDWQRLINNNWGFRPKRLNFKLFNIQVKEVTQNEGTKTIANNLTSTVQVFTDSKYQLPYVLGSAHQGCLPPFPADVFMIPQYGYLTLNNGSQAVGRSSFYCLEYFPSQMLRTGNNFTFSYTFEDVPFHSSYAHSQSLDRLMNPLIDQYLYYLSRTQTNGTNATQTLLFAQAGPQNMSAQAKNWLPGPCYRQQRVSTTVSQNNNSNFTWTGATKYHLNGRDSLVNPGVAMATHKDDEERFFPSSGVLMFGKQGAGKDNVEYTNVMLTSEEEIKTTNPVATEQYGVVADNLQQTNSAPIVGAVNSQGALPGMVWQNRDVYLQGPIWAKIPHTDGNFHPSPLMGGFGLKHPPPQILIKNTPVPADPPVNFTDAKLASFITQYSTGQVSVEIEWELQKENSKRWNPEIQYTSNYYKSANVDFAVNADGVYSEPRPIGTRYLTRNL

SEQ ID NO: 386 - DNA, 2196 bp, Adeno-associated virus
atggctgctgacggttatcttccagattggctcgaggacaacctctctgagggcattcgcgagtggtgggcgctgaaacctggagccccgcaacccaaagccaaccagcaaaagcaggacgacggccggggtctggtgcttcctggctacaagtacctcggacccttcaacggactcgacaagggggagcccgtcaacgaggcggacgccgcggccctcgagcacgacaaggcctacgaccagcagctcaaagcgggtgacaatccgtacctgcggtataatcacgccgacgccgagtttcaagagcgtctgcaagaagatacgtcctttgggggcaacctcgggcgagcagtcttccaggccaaaaagagggtactcgagcctctgggtctggttgaggaaggcgctaagacggctcctggaaagaagcggccagtagaaccggactccagctcgggcatcggcaagtcaggccagcagcccgcgaaaaagagactgaattttgggccgactggcgactcagagtcagtgcctgacccccaacctctctcagaaccacctgcaggtccctctggtctgggatctggtacaatggctgcaggcggtggcgctccaatggcagacaataacgaaggcgccgacggagtgggtaatgtctcaggaaattggcattgcgattccacatggctgggcgaccgagtcatcaccaccagcactcggacctgggccctccccacctacaacaaccacctctacaagcaaatctccaacgggacctcgggaggcagcagcaacgacaacacctactttggctacagcaccccctgggggtattttgactttaacagattccactgccacttttcaccacgcgactggcagcgactcatcaacaacaactggggattccggcccaagaagctcaacttcaagctcttcaacatccaggtcaaggaggtcacccagaatgaaggcaccaagaccaccgccaataacctcaccagcacggtgcaggtctttacggactcggagtaccagctcccgtacgtgctcggctctgcccaccagggctgcctgcctccgttcccggcggacgtgttcatgattccgcagtacgggtacctgacgctgaacaacgggagccaggccgtggggcgatcctccttctactgcctggagtactttccctcgcagatgctgagaacgggcaacaactttaccttcagctacaccttcgaggacgtgcccttccacagcagctacgcgcacagccagagcctggaccggctgatgaacccgctgattgaccagtacctgtactacctgtctcggactcagaccaacgggaccaatgccacgcagactctgttgtttgctcaggccgggcctcagaacatgtcggctcaggccaagaactggctgcctggtccttgctatcggcagcagcgcgtctctacggcagtgtcgcaaaacaacaacagcaactttacctggaccggggcgaccaagtaccacctgaacggccgagactccctggtgaaccccggtgtcgccatggcaacgcacaaggacgacgaggagcgcttcttcccgagcagcggggtcctgatgtttggcaagcagggcgctggaaaggacaatgtcgagtacaccaacgtgatgctcaccagcgaggaggagatcaagaccaccaaccctgtggccacggagcagtacggtgtggtggctgacaatctgcagcagaccaactcggctcccattgtgggggcagtcaacagccagggggccttacccggtatggtctggcagaaccgggacgtgtacctgcagggtcccatctgggccaagatcccgcatacggacggcaactttcacccgtctcctctcatgggcggctttggactgaaacacccgcctccccagatcctgatcaaaaacacgccggtacctgcggatcccccggtgaactttacggacgctaagctggcgagtttcatcacgcagtacagcaccgggcaggtcagcgtggagattgagtgggagctgcagaaggagaacagcaagcgctggaatcccgagattcagtacacttccaattattataaatcagctaatgtggactttgccgtcaatgcagatggtgtatatagcgaaccccgccccattggcactcgttacctcacccgtaatctgtaa

SEQ ID NO: 387 - protein, 731 aa, Adeno-associated virus
MAADGYLPDWLEDNLSEGIREWWALKPGAPQPKANQQKQDDGRGLVLPGYKYLGPFNGLDKGEPVNEADAAALEHDKAYDQQLKAGDNPYLRYNHADAEFQERLQEDTSFGGNLGRAVFQAKKRVLEPLGLVEEGAKTAPGKKRPVEPDSSSGIGKSGQQPAKKRLNFGPTGDSESVPDPQPLSEPPAGPSGLGSGTMAAGGGAPMADNNEGADGVGNVSGNWHCDSTWLGDRVITTSTRTWALPTYNNHLYKQISNGTSGGSSNDNTYFGYSTPWGYFDFNRFHCHFSPRDWQRLINNNWGFRPKKLNFKLFNIQVKEVTQNEGTKTTANNLTSTVQVFTDSEYQLPYVLGSAHQGCLPPFPADVFMIPQYGYLTLNNGSQAVGRSSFYCLEYFPSQMLRTGNNFTFSYTFEDVPFHSSYAHSQSLDRLMNPLIDQYLYYLSRTQTNGTNATQTLLFAQAGPQNMSAQAKNWLPGPCYRQQRVSTAVSQNNNSNFTWTGATKYHLNGRDSLVNPGVAMATHKDDEERFFPSSGVLMFGKQGAGKDNVEYTNVMLTSEEEIKTTNPVATEQYGVVADNLQQTNSAPIVGAVNSQGALPGMVWQNRDVYLQGPIWAKIPHTDGNFHPSPLMGGFGLKHPPPQILIKNTPVPADPPVNFTDAKLASFITQYSTGQVSVEIEWELQKENSKRWNPEIQYTSNYYKSANVDFAVNADGVYSEPRPIGTRYLTRNL

SEQ ID NO: 388 - DNA, 4404 bp, Adeno-associated virus
atggctgccgatggttatcttccagattggctcgagggcaacctctctgagggcattcgcgagtggtgggacttgaaacctggagccccgaaacccaaagccaaccagcaaaagcaggacgacggccggggtctggtgcttcctggctacaggtacctcggacccttcaacggactcgacaagggagagccggtcaacgaggcagacgccgcggccctcgagcacgacaaggcctacgacaagcagctcgagcagggggacaacccgtacctcaagtacaaccacgccgacgccgagtttcaggagcgtcttcaagaagatacgtcttttgggggcaacctcgggcgagcagtcttccaggccaagaagcgggttctcgaacctctcggtctggttgaggaaggcgctaagacggctcctggaaagaagagacccatagaatcccccgactcctccacgggcatcggcaagaacggccagccgcccgctaaaaagaagctcaactttgggcagactggcgactcagagtcagtgcccgacccccaacctctcggagaacctcccgccgcgccctcaggtctgggatctggtacaatggctgcaggcggtggcgcaccaatggcagacaataacgaaggcgccgacggagtgggtaatgcctccggaaattggcattgcgattccacatggctgggcgacagagtcatcaccaccagcacccgcacctgggccctgcccacctacaacaaccacctctacaagcagatatcaagtcagagcggggctaccaacgacaaccacttcttcggctacagcaccccctggggctattttgacttcaacagattccactgccacttctcaccacgtgactggcagcgactcatcaacaacaactggggattccggcccagaaagctgcggttcaagttgttcaacatccaggtcaaggaggtcacgacgaacgacggcgttacgaccatcgctaataaccttaccagcacgattcaggtcttctcggactcggagtaccaactgccgtacgtcctcggctctgcgcaccagggctgcctccctccgttccctgcggacgtgttcatgattcctcagtacggatatctgactctaaacaacggcagtcagtctgtgggacgttcctccttctactgcctggagtactttccttctcagatgctgagaacgggcgataactttgaattcagctacacctttgaggaagtgcctttccacagcagctatgcgcacagccagagcctggaccggctgatgaatcccctcatcgaccagtacctgtactacctggcccggacccagagcactacggggtccacaagggagctgcagttccatcaggctgggcccaacaccatggccgagcaatcaaagaactggctgcccggaccctgttatcggcagcagagactgtcaaaaaacatagacagcaacaacaacagtaactttgcctggaccggggccactaaataccatctgaatggtagaaattcattaaccaacccgggcgtagccatggccaccaacaaggacgacgaggaccagttctttcccatcaacggagtgctggtttttggcaaaacgggggctgccaacaagacaacgctggaaaacgtgctaatgaccagcgaggaggagatcaaaaccaccaatcccgtggctacagaagaatacggtgtggtctccagcaacctgcaatcgtctacggccggaccccagacacagactgtcaacagccagggggctctgcccggcatggtctggcagaaccgggacgtgtacctgcagggtcccatctgggccaaaattcctcacacggacggcaactttcacccgtctcccctgatgggcggatttggactcaaacacccgcctcctcaaattctcatcaaaaacaccccggtacctgctaatcctccagaggtgtttactcctgccaagtttgcctcatttatcacgcagtacagcaccggccaggtcagcgtggagatcgagtgggaactgcagaaagaaaacagcaaacgctggaatccagagattcagtacacctcaaattatgccaagtctaataatgtggaatttgctgtcaacaacgaaggggtttatactgagcctcgccccattggcacccgttacctcacccgtaacctgtaaatggctgccgatggttatcttccagattggctcgaggacaacctctctgagggcattcgcgagtggtgggacttgaaacctggagccccgaaacccaaagccaaccagcaaaagcaggacgacggccggggtctggtgcttcctggctacaagtacctcggacccttcaacggactcgacaagggggagcccgtcaacgcggcggacgcagcggccctcgagcacgacaaggcctacgaccagcagctcaaagcgggtgacaatccgtacctgcggtataaccacgccgacgccgagtttcaggagcgtctgcaagaagatacgtcttttgggggcaacctcgggcgagcagtcttccaggccaagaagcgggttctcgaacctctcggtctggttgaggaaggcgctaagacggctcctggaaagaagagaccggtagagccatcaccccagcgttctccagactcctctacgggcatcggcaagaaaggccagcagcccgcgaaaaagagactcaactttgggcagactggcgactcagagtcagtgcccgaccctcaaccaatcggagaaccccccgcaggcccctctggtctgggatctggtacaatggctgcaggcggtggcgctccaatggcagacaataacgaaggcgccgacggagtgggtagttcctcaggaaattggcattgcgattccacatggctgggcgacagagtcatcaccaccagcacccgaacctgggccctccccacctacaacaaccacctctacaagcaaatctccaacgggacttcgggaggaagcaccaacgacaacacctacttcggctacagcaccccctgggggtattttgactttaacagattccactgccacttctcaccacgtgactggcagcgactcatcaacaacaactggggattccggcccaagagactcaacttcaagctcttcaacatccaggtcaaggaggtcacgcagaatgaaggcaccaagaccatcgccaataaccttaccagcacgattcaggtctttacggactcggaataccagctcccgtacgtcctcggctctgcgcaccagggctgcctgcctccgttcccggcggacgtcttcatgattcctcagtacgggtacctgactctgaacaatggcagtcaggccgtgggccgttcctccttctactgcctggagtactttccttctcaaatgctgagaacgggcaacaactttgagttcagctaccagtttgaggacgtgccttttcacagcagctacgcgcacagccaaagcctggaccggctgatgaaccccctcatcgaccagtacctgtactacctgtctcggactcagtccacgggaggtaccgcaggaactcagcagttgctattttctcaggccgggcctaataacatgtcggctcaggccaaaaactggctacccgggccctgctaccggcagcaacgcgtctccacgacactgtcgcaaaataacaacagcaactttgcctggaccggtgccaccaagtatcatctgaatggcagagactctctggtaaatcccggtgtcgctatggcaacccacaaggacgacgaagagcgattttttccgtccagcggagtcttaatgtttgggaaacagggagctggaaaagacaacgtggactatagcagcgttatgctaaccagtgaggaagaaattaaaaccaccaacccagtggccacagaacagtacggcgtggtggccgataacctgcaacagcaaaacgccgctcctattgtaggggccgtcaacagtcaaggagccttacctggcatggtctggcagaaccgggacgtgtacctgcagggtcctatctgggccaagattcctcacacggacggaaactttcatccctcgccgctgatgggaggctttggactgaaacacccgcctcctcagatcctgattaagaatacacctgttcccgcggatcctccaactaccttcagtcaagctaagctggcgtcgttcatcacgcagtacagcaccggacaggtcagcgtggaaattgaatgggagctgcagaaagaaaacagcaaacgctggaacccagagattcaatacacttccaactactacaaatctacaaatgtggactttgctgttaacacagatggcacttattctgagcctcgccccatcggcacccgttacctcacccgtaatctgtaa

SEQ ID NO: 389 - protein, 738 aa, Adeno-associated virus; identical to SEQ ID NO: 7

SEQ ID NO: 390 - DNA, 3129 bp, Adeno-associated virus
gaattcgccctttctacggctgcgtcaactggaccaatgagaactttcccttcaacgattgcgtcgacaagatggtgatctggtgggaggagggcaagatgacggccaaggtcgtggagtccgccaaggccattctcggcggcagcaaagtgcgcgtggaccaaaagtgcaagtcgtccgcccagatcgaccccacccccgtgatcgtcacctccaacaccaacatgtgcgccgtgattgacgggaacagcaccaccttcgagcaccagcagccgttgcaggaccggatgttcaagtttgaactcacccgccgtctggagcacgactttggcaaggtgacaaagcaggaagtcagagagttcttccgctgggcgcaggatcacgtgaccgaggtggcgcacgagttctacgtcagaaagggtggagccaacaagagacccgcccccgatgacgcggataaaagcgagcccaagcgggcctgcccctcagtcgcggatccatcgacgtcagacgcggaaggagctccggtggactttgccgacaggtaccaaaacaaatgttctcgtcacgcgggcatgcttcagatgctgtttccctgcaaaacatgcgagagaatgaatcagaatttcaacatttgcttcacgcacgggaccagagactgttcagaatgtttccccggcgtgtcagaatctcaaccggtcgtcagaaaaaagacgtatcggaaactctgtgcgattcatcatctgctgggggcgggcacccgagattgcttgctcggcctgcgatctggtcaacgtggacctagatgactgtgtttctgagcaataaatgacttaaaccaggtatggctgccgatggttatcttccagattggctcgaggacaacctctctgagggcattcgcgagtggtgggacttgaaacctggagccccgaaacccaaagccaaccagcaaaagcaggacgacggccggggtctggtgcttcctggctacaagtacctcggacccttcaacggactcgacaagggggagcccgtcaacgcggcggacgcagcggccctcgagcacgacaaggcctacgaccagcagctcaaagcgggtgacaatccgtacctgcggtataaccacgccgacgccgagtttcaggagcgtctgcaagaagatacgtcttttgggggcaacctcgggcgagcagtcttccaggccaagaagcgggttctcgaacctctcggtctggttgaggaaggcgctaagacggctcctggaaagaagagaccggtagagccatcaccccagcgttctccagactcctctacgggcatcggcaagaaaggccagcagcccgcgaaaaagagactcaactttgggcagactggcgactcagagtcagtgcccgaccctcaaccaatcggagaaccccccgcaggcccctctggtctgggatctggtacaatggctgcaggcggtggcgctccaatggcagacaataacgaaggcgccgacggagtgggtagttcctcaggaaattggcattgcgattccacatggctgggcgacagagtcatcaccaccagcacccgaacctgggccctccccacctacaacaaccacctctacaagcaaatctccaacgggacttcgggaggaagcaccaacgacaacacctacttcggctacagcaccccctgggggtattttgactttaacagattccactgccacttctcaccacgtgactggcagcgactcatcaacaacaactggggattccggcccaagagactcaacttcaagctcttcaacatccaggtcaaggaggtcacgcagaatgaaggcaccaagaccatcgccaataaccttaccagcacgattcaggtctttacggactcggaataccagctcccgtacgtcctcggctctgcgcaccagggctgcctgcctccgttcccggcggacgtcttcatgattcctcagtacgggtacctgactctgaacaatggcagtcaggccgtgggccgttcctccttctactgcctggagtactttccttctcaaatgctgagaacgggcaacaactttgagttcagctaccagtttgaggacgtgccttttcacagcagctacgcgcacagccaaagcctggaccggctgatgaaccccctcatcgaccagtacctgtactacctgtctcggactcagtccacgggaggtaccgcaggaactcagcagttgctattttctcaggccgggcctaataacatgtcggctcaggccaaaaactggctacccgggccctgctaccggcagcaacgcgtctccacgacactgtcgcaaaataacaacagcaactttgcctggaccggtgccaccaagtatcatctgaatggcagagactctctggtaaatcccggtgtcgctatggcaacccacaaggacgacgaagagcgattttttccgtccagcggagtcttaatgtttgggaaacagggagctggaaaagacaacgtggactatagcagcgttatgctaaccagtgaggaagaaattaaaaccaccaacccagtggccacagaacagtacggcgtggtggccgataacctgcaacagcaaaacgccgctcctattgtaggggccgtcaacagtcaaggagccttacctggcatggtctggcagaaccgggacgtgtacctgcagggtcctatctgggccaagattcctcacacggacggaaactttcatccctcgccgctgatgggaggctttggactgaaacacccgcctcctcagatcctgattaagaatacacctgttcccgcggatcctccaactaccttcagtcaagctaagctggcgtcgttcatcacgcagtacagcaccggacaggtcagcgtggaaattgaatgggagctgcagaaagaaaacagcaaacgctggaacccagagattcaatacacttccaactactacaaatctacaaatgtggactttgctgttaacacagatggcacttattctgagcctcgccccatcggcacccgttacctcacccgtaatctgtaattgcttgttaatcaataaaccggttgattcgtttcagttgaactttggtctctgcgaagggcgaattc

SEQ ID NO: 391 - protein, 738 aa, Adeno-associated virus; identical to SEQ ID NO: 7

SEQ ID NO: 392 - protein, 733 aa, Adeno-associated virus
MAADGYLPDWLEDNLSEGIREWWDLRPGAPKPKANQQKQDDGRGLVLPGYKYLGPFNGLDKGEPVNEADAAALEHDKAYDKQLEQGDNPYLKYNHADAEFQERLQEDTSFGGNLGRAVFQAKKRVLEPLGLVEEGAKTAPGKKRPIESPDSSTGIGKKGQQPAKKRLNFGQTGDSESVPDPQPIGEPPAGPSGLGSGTMAAGGGAPMADNNEGADGVGSSSGNWHCDSTWLGDRVITTSTRTWALPTYNNHLYKQISNGTSGGSTNDNTYFGYSTPWGYFDFNRFHCHFSPRDWQRLINNNWGFRPKRLNFKLFNIQVKEVTQNEGTKTIANNLTSTIQVFTDSEYQLPYVLGSAHQGCLPPFPADVFMIPQYGYLTLNNGSQAVGRSSFYCLEYFPSQMLRTGNNFEFSYQFEDVPFHSSYAHSQSLDRLMNPLIDQYLYYLSRTQSTGGTAGTQQLLFSQAGPNNMSAQAKNWLPGPCYRQQRVSTTVSQNNNSNFAWTGATKYHLNGRDSLVNPGVAMATHKGDEERFFPSSGVLMFGKQGAGKDNVDYSSVMLTSEEEIKTTNPVATEQYGVVADNLQQQNAAPIVGAVNSQGALPGMVWQNRDVYLQGPIWAKIPHTDGNFHPSPLMGGFGLKHPPPQILIKNTPVPADPPTTFSQAKLASFITQYSTGQVSVEIEWELQKENSKRWNPEIQYTSNYYKSTNVDFAVNTEGTYSEPRPIGTRYLTRNL

SEQ ID NO: 393 - DNA, 2501 bp, Adeno-associated virus
gaattcgcccttggctgcgtcaactggaccaatgagaactttcccttcaacgattgcgtcgacaagatggtgatctggtgggaggagggcaagatgacggccaaggtcgtggagtccgccaaggccattcatcatctgctggggcgggctcccgagattgcttgctcggcctgcgatctggtcaacgtggacctggatgactgtgtttctgagcaataaatgacttaaaccaggtatggctgccgatggttatcttccagattggctcgaggacaacctctctgagggcattcgcgagtggtgggacttgagacctggagccccgaaacccaaagccaaccagcaaaagcaggacgacggccggggtctggtgcttcctggctacaagtacctcggacccttcaacggactcgacaagggagagccggtcaacgaggcagacgccgcggccctcgagcacgacaaggcctacgacaagcagctcgagcagggggacaacccgtacctcaagtacaaccacgccgacgccgagtttcaggagcgtcttcaagaagatacgtcttttgggggcaacctcgggcgagcagtcttccaggccaagaagcgggttctcgaacctctcggtctggttgaggaaggcgctaagacggctcctggaaagaagagacccatagaatcccccgactcctccacgggcatcggcaagaaaggccagcagcccgctaaaaagagactcaactttgggcagactggcgactcagagtcagtgcccgaccctcaaccaatcggagaaccccccgcaggcccctctggtctgggatctggcacaatggctgcaggcggtggcgctccaatggcagacaataacgaaggcgccgacggagtgggtagttcctcaggaaattggcattgcgattccacatggctgggcgacagagtcatcaccaccagcacccgaacctgggccctccccacctacaacaaccacctctacaagcaaatctccaacgggacatcgggaggaagcaccaacgacaacacctacttcggctacagcaccccctgggggtattttgactttaacagattccactgccacttctcaccacgtgactggcagcgactcatcaacaacaactggggattccggcccaagagactcaacttcaagctcttcaacatccaggtcaaggaggtcacgcagaatgaaggcaccaagaccatcgccaataaccttaccagcacgattcaggtctttacggactcggaataccagctcccgtacgtcctcggctctgcgcaccagggctgcctgcctccgttcccggcggacgtcttcatgattcctcagtacgggtacctgactctgaacaacggcagtcaggccgtgggccgttcctccttctactgcctggagtactttccttctcaaatgctgagaacgggcaacaactttgagttcagctaccagtttgaggacgtgccttttcacagcagctatgcgcacagccaaagcctggaccggctgatgaaccccctcatcgaccagtacctgtactacctgtctcggactcagtccacgggaggtaccgcaggaactcagcagttgctattttctcaggccgggcctaataacatgtcggctcaggccaaaaactggctacccgggccctgctaccggcagcaacgcgtctccacgacagtgtcgcaaaataacaacagcaactttgcttggaccggtgccaccaagtatcatctgaatggcagagactctctggtaaatcccggtgtcgctatggcaacgcacaagggcgacgaagagcgattttttccatccagcggagtcttgatgtttgggaaacagggagctggaaaagacaacgtagactatagcagcgttatgctaaccagtgaggaagaaatcaaaaccaccaacccagtggccacagaacagtacggcgtggtggccgataacctgcaacagcaaaacgccgctcctattgtaggggccgtcaacagtcaaggagccttacctggcatggtctggcagaaccgggacgtgtacctgcagggtcctatctgggccaagattcctcacacggacggcaactttcatccttcgccgctgatgggaggctttggactgaaacacccgcctcctcagatcctgattaagaatacacctgttcccgcggatcctccaactaccttcagtcaagccaagctggcgtcgttcatcacgcagtacagcaccggacaggtcagcgtggaaattgaatgggagctgcagaaagagaacagcaagcgctggaacccagagattcagtatacttccaactactacaaatctacaaatgtggactttgctgtcaatactgagggtacttattcagagcctcgccccattggcacccgttacctcacccgtaacctgtaattgcctgttaatcaataaaccggttgattcgtttcagttgaactttggtctcaagggcgaattc

SEQ ID NO: 394 - DNA, 2187 bp, Adeno-associated virus
atggctgccgatggttatcttccagattggctcgaggacaacctctctgagggcattcgcgagtggtgggacttgaaacctggagccccgaaacccaaagccaaccagcaaaagcaggacgacggccggggtctggtgcttcctggctacaagtacctcggacccttcaacggactcgacaagggagagccggtcaacgaggcagacgccgcggccctcgagcacgacaaggcctacgacaagcagctcgagcagggggacaacccgtacctcaagtacaaccacgccgacgccgagtttcaggagcgtcttcaagaagatacgtcttttgggggcaacctcgggcgagcagtcttccaggccaagaagcgggttctcgaacctctcggtctggttgaggaaggcgctaagacggctcctggaaagaagagacccatagaatcccccgactcctccacgggcatcggcaagaaaggccagcagcccgctaaaaagaagctcaactttgggcagactggcgactcagagtcagtgcccgacccccaacctctcggagaacctcccgccgcgccctcaggtctgggatctggtacaatggctgcaggcggtggcgcaccaatggcagacaataacgaaggcgccgacggagtgggtaatgcctccggaaattggcattgcgattccacatggctgggcgacagagtcatcaccaccagcacccgcacctgggccctgcccacctacaacaaccacctctacaagcagatatcaagtcagagcggggctaccaacgacaaccacttcttcggctacagcaccccctggggctattttgacttcaacagattccactgccacttctcaccacgtgactggcagcgactcatcaacaacaactggggattccggcccagaaagctgcggttcaagttgttcaacatccaggtcaaggaggtcacgacgaacgacggcgttacgaccatcgctaataaccttaccagcacgattcaggtcttctcggactcggagtaccaactgccgtacgtcctcggctctgcgcaccagggctgcctccctccgttccctgcggacgtgttcatgattcctcagtacggatatctgactctaaacaacggcagtcagtctgtgggacgttcctccttctactgcctggagtactttccttctcagatgctgagaacgggcaataactttgaattcagctacacctttgaggaagtgcctttccacagcagctatgcgcacagccagagcctggaccggctgatgaatcccctcatcgaccagtacctgtactacctggcccggacccagagcactacggggtccacaagggagctgcagttccatcaggctgggcccaacaccatggccgagcaatcaaagaactggctgcccggaccctgttatcggcagcagagactgtcaaaaaacatagacagcaacaacaacagtaactttgcctggaccggggccactaaataccatctgaatggtagaaattcattaaccaacccgggcgtagccatggccaccaacaaggacgacgaggaccagttctttcccatcaacggagtgctggtttttggcgaaacgggggctgccaacaagacaacgctggaaaacgtgctaatgaccagcgaggaggagatcaaaaccaccaatcccgtggctacagaagaatacggtgtggtctccagcaacctgcaatcgtctacggccggaccccagacacagactgtcaacagccagggggctctgcccggcatggtctggcagaaccgggacgtgtacctgcagggtcccatctgggccaaaattcctcacacggacggcaactttcacccgtctcccctgatgggcggatttggactcaaacacccgcctcctcaaattctcatcaaaaacaccccggtacctgctaatcctccagaggtgtttactcctgccaagtttgcctcatttatcacgcagtacagcaccggccaggtcagcgtggagatcgagtgggaactgcagaaagaaaacagcaaacgctggaatccagagattcagtacacctcaaattatgccaagtctaataatgtggaatttgctgtcaacaacgaaggggtttatactgagcctcgccccattggcacccgttacctcacccgtaacctgtaa

SEQ ID NO: 395 - protein, 728 aa, Adeno-associated virus; identical to SEQ ID NO: 63

SEQ ID NO: 396 - protein, 728 aa, Adeno-associated virus; identical to SEQ ID NO: 155

SEQ ID NO: 397 - protein, 728 aa, Adeno-associated virus; identical to SEQ ID NO: 155

SEQ ID NO: 398 - protein, 733 aa, Adeno-associated virus
MAADGHLPDWLEDNLSEGIREWWDLKPGAPKPKANQQKQDDGRGLVLPGYKYLGPFNGLDKGEPVNAADAAALEHDKAYDQQLKAGDNPYLRYNHADAEFQERLQEDTSFGGNLGRAVFQAKKRVLEPLGLVEEGAKTAPGKKRPIESPDSSTGIGKKGQQPAKKKLNFGQTGDSESVPDPQPIGEPPAGPSGLGSGTMAAGGGAPMADNNEGADGVGSSSGNWHCDSTWLGDRVITTSTRTWALPTYNNHLYKQISNGTSGGSTNDNTYFGYSTPWGYFDFNRFHCHFSPRDWQRLINNSWGFRPKRLNFKLFNIQVKEVTQNEGTKTIANNLTSTIQVFTDSEYQLPYVLGSAHQGCLPPFPADVFMIPQYGYLTLNNGSQAVGRSSFYCLEYFPSQMLRTGNNFEFSYQFEDVPFHSSYAHSQSLDRLMNPLIDQYLYYLSRTQSTGGTAGTQQLLFSQAGPNNMSAQAKNWLPGPCYRQQRVSTTLSQNNNSNFAWTGATKYHLNGRDSLVNPGVAMATHKDDEERFFPSSGVLMFGKQGAGKDNVDYSSVMLTSEEEIKTTNPVATEQYGVVADNLQQQNAAPIVGAVNSQGALPGMVWQNRDVYLQGPIWAKIPHTDGNFHPSPLMGGFGLKHPPPQILIKNTPVPADPPTTFSQAKLASFITQYSTGQVSVEIEWELQKENSKRWNPEIQYTSNYYKSTNVDFAVNTEGTYSEPRPIGTRYLTRNL

SEQ ID NO: 399 - DNA, 3113 bp, Adeno-associated virus
gaattcgccctttctacggctgcgtcaactggaccaatgagaactttcccttcaacgattgcgtcgacaagatggtgatctggtgggaggagggcaagatgacggccaaggtcgtggagtccgccaaggccattctcggcggcagcaaggtgcgcgtggaccaaaagtgcaagtcgtccgcccagatcgatcccacccccgtgatcgtcacttccaacaccaacatgtgcgccgtgattgacgggaacagcaccaccttcgagcaccagcagccgttacaagaccggatgttcaaatttgaactcacccgccgtctggagcatgactttggcaaggtgacaaagcaggaagtcaaagagttcttccgctgggcgcaggatcacgtgaccgaggtggcgcatgagttctacgtcagaaagggtggagccaacaagagacccgcccccgatgacgcggataaaagcgagcccaagcgggcctgcccctcagtcgcggatccatcgacgtcagacgcggaaggagctccggtggactttgccgacaggtaccaaaacaaatgttctcgtcacgcgggcatgcttcagatgctgcttccctgcaagacatgcgagagaatgaatcagaatttcagcatttgcttcacgcacgggaccagagactgttcagaatgtttccccggcgtgtcagaatctcaaccggtcgtcagaaagaggacgtatcggaaactctgtgccattcatcatctgctggggcgggctcccgagattgcttgctcggcctgcgatctggtcaacgtggacctggatgactgtgtttctgagcaataaatgacttaaaccaggtatggctgccgatggtcatcttccagattggctcgaggacaacctctctgagggcattcgcgagtggtgggacttgaaacctggagccccgaaacccaaagccaaccagcaaaagcaggacgacggccggggtctggtgcttcctggctacaagtacctcggacccttcaacggactcgacaagggggagcccgtcaacgcggcggacgcagcggccctcgagcacgacaaggcctacgaccagcagctcaaagcgggtgacaatccgtacctgcggtataaccacgccgacgccgagtttcaggagcgtcttcaagaagatacgtcttttgggggcaacctcgggcgagcagtcttccaggccaagaagcgggttctcgaacctctcggtctggttgaggaaggcgctaagacggctcctggaaagaagagacccatagaatcccccgactcctccacgggcatcggcaagaaaggccagcagcccgctaaaaagaagctcaactttgggcagactggcgactcagagtcagtgcccgaccctcaaccaatcggagaaccccccgcaggcccctctggtctgggatctggtacaatggctgcaggcggtggcgctccaatggcagacaataacgaaggcgccgacggagtgggtagttcctcaggaaattggcattgcgattccacatagctgggcgacagagtcatcaccaccagcacccgaacctgggccctccccacctacaacaaccacctctacaagcaaatctccaacgggacatcgggaggaagcaccaacgacaacacctacttcggctacagcaccccctgggggtattttgactttaacagattccactgccacttctcaccacgtgactggcagcgactcatcaacaacagctggggattccggcccaagagactcaacttcaagctcttcaacatccaggtcaaggaggtcacgcagaatgaaggcaccaagaccatcgccaataaccttaccagcacgattcaggtctttacggactcggaataccagctcccgtacgtcctcggctctgcgcaccagggctgcctgcctccgttcccggcggacgtcttcatgattcctcagtacgggtacctgactctgaacaacggcagtcaggccgtgggccgttcctccttctactgcctggagtactttccttctcaaatgctgagaacgggcaacaactttgagttcagctaccagtttgaggacgtgccttttcacagcagctacgcgcacagccaaagcctggaccggctgatgaaccccctcatcgaccagtacctgtactacctgtctcggactcagtccacgggaggtaccgcaggaactcagcagttgctattttctcaggccgggcctaataacatgtcggctcaggccaaaaactggctacccgggccctgctaccggcagcaacgcgtctccacgacactgtcgcaaaataacaacagcaactttgcttggaccggtgccaccaagtatcatctgaatggcagagactctctggtaaatcccggtgtcgctatggcaacgcacaaggacgacgaagagcgattttttccatccagcggagtcttgatgtttgggaaacagggagctggaaaagacaacgtggactatagcagcgttatgctaaccagtgaggaagaaatcaaaaccaccaacccagtggccacagaacagtacggcgtggtggccgataacctgcaacagcaaaacgccgctcctattgtaggggccgtcaacagtcaaggagccttacctggcatggtctggcagaaccgggacgtgtacctgcagggtcctatctgggccaagattcctcacacggacggcaactttcatccttcgccgctgatgggaggctttggactgaaacacccgcctcctcagatcctgattaagaatacacctgttcccgcggatcctccaactaccttcagtcaagccaagctggcgtcgttcatcacgcagtacagcaccggacaggtcagcgtggaaattgaatgggagctgcagaaagagaacagcaagcgctggaacccagagattcagtatacttccaactactacaaatctacaaatgtggactttgctgtcaatactgagggtacttattcagagcctcgccccattggcacccgttacctcacccgtaacctgtaattgcctgttaatcaataaaccggttaattcgtttcagttgaactttggtctctgcgaagggcgaattc

SEQ ID NO: 400 - protein, 731 aa, Adeno-associated virus
MAADGYLPDWLEDNLSEGIREWWDLKPGAPKPKANQQKQDDGRGLVLPGYKYLGPFNGLDKGEPVNEADAAALEHDKAYDKQLEQGDNPYLKYNHADAEFQERLQEDTSFGGNLGRAVFRAKKRVLEPLGLVEEGAKTAPGKKRPIESPDSSTGIGKKGQQPAKKKLNFGQTGDSESVPDPQPLGEPPAAPSGLGSGTMAAGGGAPMADNNEGADGVGNASGNWHCDSTWLGDRVITTSTRTWALPTYNNHLYKQISSQSGATNDNHFFGYSTPWGYFDFNRFHCHFSPRDWQRLINNNRGFRPRKLRFKLFNIQVKEVTTNDGVTTIANNLTSTIQVFSDSEYQLPYVLGSAHQGCLPPFPADVFMIPQYGYLTLNNGSQSVGRSSFYCLEYFPSQMLRTGNNFEFSYQFEDVPFHSSYAHSQSLDRLMNPLIDQYLYYLSRTQSTGGTAGTQQLLFSQAGPNNMSAQAKNWLPGPCYRQQRVSTTLSQNNNSNFAWTGATKYHLNGRDSLVNPGVAMATHKDDEERFFPSSGVLMFGKQGAGKDNVDYSSVMLTSEEEIKTTNPVATEQYGVVADNLQQQNAAPIVGAVNSQGALPGMAWQNRDVYLQGPIWAKIPHTDGNFHPSPLMGGFGLKHPPPQILIKNTPVPADPPTTFSQAKLASFITQYSTGQVSVEIEWELQKENSKRWNPEIQYTSNYYKSTNVDFAVNTEGTYSEPRPIGTRYLTRNL

SEQ ID NO: 401 - DNA, 3106 bp, Adeno-associated virus
gaattcgcccttctacggctgcgtcaactggaccaatgagaactttcccttcaacgattgcgtcgacaagatggtgatctggtgggaggagggcaagatgacggccaaggtcgtggagtccgccaaggccattctcggcggcagcaaggtgcgcgtggaccaaaagtgcaagtcgtccgcccagatcgaccccacccccgtgatcgtcacctccaacaccaacatgtgcgccgtgattgacgggaacagcaccaccttcgagcaccagcagccgttgcaggaccggatgttcaaatttgaactcacccgccgtctggagcatgactttggcaaggcgacaaagcaggaagtcaaagagttcttccgctgggcgcaggatcacgtgaccgaggtggcgcatgagttctacgtcagaaagggtggagccaacaagagacccgcccccgatgacgcggataaaagcgagcccaagcgggcccgcccctcagtcgcggatccatcgacgtcagacgcggaaggagctccggtggactttgccgacaggtaccaaaacaaatgttctcgtcacgcgggcatgcttcagatgctgtttccctgcaaaacatgcgagagaatgaatcagaatttcaacatttgcttcacgcacgggaccagagactgttcagaatgtttccccggcgtgtcagaatctcaaccggtcgtcagaaagaggacgtatcggaaactctgtgccattcatcatctgctggggcgggctcccgagattgcttgctcggcctgcgatctggtcaacgtggacctggatgactgtgtttctgagcaataaatgacttaaaccaggtatggctgccgatggttatcttccagattggctcgaggacaacctctctgagggcattcgcgagtggtgggacttgaaacctggagccccgaaacccaaagccaaccagcaaaagcaggacgacggccggggtctggtgcttcctggctacaagtacctcggacccttcaacggactcgacaagggagagccggtcaacgaggcagacgccgcggccctcgagcacgacaaggcctacgacaagcagctcgagcagggggacaacccgtacctcaagtacaaccacgccgacgccgagtttcaggagcgtcttcaagaagatacgtcttttgggggcaacctcgggcgagcagtcttccgggccaagaagcgggttctcgaacctctcggtctggttgaggaaggcgctaagacggctcctggaaagaagagacccatagaatcccccgactcctccacgggcatcggcaagaaaggccagcagcccgctaaaaagaagctcaactttgggcagactggcgactcagagtcagtgcccgacccccaacctctcggagaacctcccgccgcgccctcaggtctgggatctggtacaatggctgcaggcggtggcgcaccaatggcagacaataacgaaggcgccgacggagtgggtaatgcctccggaaattggcattgcgattccacatggctgggcgacagagtcatcaccaccagcacccgcacctgggccctgcccacctacaacaaccacctctacaagcagatatcaagtcagagcggggctaccaacgacaaccacttcttcggctacagcaccccctggggctattttgacttcaacagattccactgccacttctcaccacgtgactggcagcgactcatcaacaacaaccggggattccggcccagaaagctgcggttcaagttgttcaacatccaggtcaaggaggtcacgacgaacgacggcgttacgaccatcgctaataaccttaccagcacgattcaggtcttctcggactcggagtaccaactgccgtacgtcctcggctctgcgcaccagggctgcctccctccgttccctgcggacgtgttcatgattcctcagtacggatatctgactctaaacaacggcagtcagtctgtgggacgttcctccttctactgcctggagtactttccttctcagatgctgagaacgggcaataactttgaattcagctaccagtttgaggacgtgccctttcacagcagctacgcgcacagccaaagcctggaccggctgatgaaccccctcatcgaccagtacctgtactacctgtctcggactcagtccacgggaggtaccgcaggaactcagcagttgctattttctcaggccgggcctaataacatgtcggctcaggccaaaaactggctacccgggccctgctaccggcagcaacgcgtctccacgacactgtcgcaaaataacaacagcaactttgcttggaccggtgccaccaagtatcatctgaatggcagagactctctggtaaatcccggtgtcgctatggcaacgcacaaggacgacgaagagcgattttttccatccagcggagtcttgatgtttgggaaacagggagctggaaaagacaacgtggactatagcagcgttatgctaaccagtgaggaagaaatcaaaaccaccaacccagtggccacagaacagtacggcgtggtggccgataacctgcaacagcaaaacgccgctcctattgtaggggccgtcaacagtcaaggagccttacctggcatggcctggcagaaccgggacgtgtacctgcagggtcctatctgggccaagattcctcacacggacggcaactttcatccttcgccgctgatgggaggctttggactgaaacacccgcctcctcagatcctgattaagaatacacctgttcccgcggatcctccaactaccttcagtcaagccaagctggcgtcgttcatcacgcagtacagcaccggacaggtcagcgtggaaattgaatgggagctgcagaaagagaacagcaagcgctggaacccagagattcagtatacttccaactactacaaatctacaaatgtggactttgctgtcaatactgagggtacttattcagagcctcgccccattggcacccgttacctcacccgtaacctgtaattgcctgttaatcaataaaccggttaattcgtttcagttgaactttggtctctgcgaagggcgaattc

SEQ ID NO: 402 - protein, 738 aa, Adeno-associated virus
MAADGYLPDWLEDNLSEGIREWWDLKPGAPKPKANQQKQDDGRGLVLPGYKYLGPFNGLDKGEPVNEADAAALEHDKAYDKQLEQGDNPYLKYNHADAEFQERLQEDTSFGGNLGRAVFQAKKRVLEPLGLVEEGAKTAPGKKRPVEPSPQRSPDSSTGIGKTGQQPAKKRLNFGQTGDSESVPDPQPIGEPPAGPSGLGSGTMAAGGGAPMADNNEGADGVGSSSGNWHCDSTWLGDRVITTSTRTWALPTYNNHLYKQISNGTSGGSTNDNTYFGYSTPWGYFDFNRFHCHFSPRDWQRLINNNWGFRPKRLNFKLFNIQVKEVTQNEGTKTIANNLTSTIQVFTDSEYQLPYVLGSAHQGCLPPFPADVFMIPQYGYLTLNNGSQAVGRSSFYCLEYFPSQMLRTGNNFEFSYQFEDVPFHSSYAHSQSLDRLMNPLIDQYLYYLSRTQSTGGTAGTQQLLFSQAGPNNMSAQAKNWLPGPCYRQQRVSTTLSQNNNSNFAWTGATKYHLNGRDSLVNPGVAMATHKDDEERFFPSSGVLMFGKQGAGKDNVDYSSVMLTSEEEIKTTNPVATEQYGVVADNLQQQNAAPIVGAVNSQGALPGMVWQNRDVYLQGPIWAKIPHTDGNFHPSPLMGGFGLKHPPPQILIKNTPVPADPPTTFSQAKLASFITQYSTGQVSVEIEWELQKENSKRWNPEIQYTSNYYKSTNVDFAVNTEGTYSEPRPIGTRYLTRNL

SEQ ID NO: 403 - DNA, 3197 bp, Adeno-associated virus
gaattcgccctttctacggctgcgtcaactggaccaatgagaactttcccttcaacgattgcgtcgacaagatggtgatctggtgggaggagggcaagatgacggccaaggtcgtggagtccgccaaggccattctcggcggcagcaaggtgcgcgtggaccaaaagtgcaagtcgtccgcccagatcgaccccacccccgtgatcgtcacctccaacaccaacatgtgcgccgtgattgacgggaacagcaccaccttcgagcaccagcagccgttacaagaccggatgttcaaatttgaactcacccgccgtctggagcacgactttggcaaggtgacaaagcaggaagtcaaagagttcttccgctgggcgcaggatcacgtgaccgaggtggcgcatgagttctacgtcagaaagggtggagccaacaagagacccgcccccgatgacgcggataaaagcgagcccaagcgggcctgcccctcagtcgcggatccatcgacgtcagacgcggaaggagctccggtggactttgccgacaggtaccaaaacaaatgttctcgtcacgcgggcatgcttcagatgctgtttccctgcaagacatgcgagagaatgaatcagaatttcaacatttgcttcacgcacgggaccagagactgttcagaatgtttccccggcgtgtcagaatctcaaccggtcgtcagaaagaggacgtatcggaaactctgtgccattcatcatctgctggggcgggctcccgagattgcttgctcggcctgcgatctggtcaacgtggacctggatgactgtgtttctgagcaataaatgacttaaaccaggtatggctgccgatggttatcttccagattggctcgaggacaacctctctgagggcattcgcgagtggtgggacttgaaacctggagccccgaaacccaaagccaaccagcaaaagcaggacgacggccggggtctggtgcttcctggctacaagtacctcggacccttcaacggactcgacaagggagagccggtcaacgaggcagacgccgcggccctcgagcacgacaaggcctacgacaagcagctcgagcagggggacaacccgtacctcaagtacaaccacgccgacgccgagtttcaggagcgtcttcaagaagatacgtcttttgggggcaacctcgggcgagcagtcttccaggccaagaagcgggttctcgaacctctcggtctggttgaggaaggcgctaagacggctcctggaaagaagagaccggtagagccatcaccccagcgttctccagactcctctacgggcatcggcaagacaggccagcagcccgcgaaaaagagactcaactttgggcagactggcgactcagagtcagtgcccgaccctcaaccaatcggagaaccccccgcaggcccctctggtctgggatctggtacaatggctgcaggcggtggcgctccaatggcagacaataacgaaggcgccgacggagtgggtagttcctcaggaaattggcattgcgattccacatggctgggcgacagagtcatcaccaccagcacccgaacctgggccctccccacctacaacaaccacctctacaagcaaatctccaacgggacatcgggaggaagcaccaacgacaacacctacttcggctacagcaccccctgggggtattttgactttaacagattccactgccacttctcaccacgtgactggcagcgactcatcaacaacaactggggattccggcccaagagactcaacttcaagctcttcaacatccaggtcaaggaggtcacgcagaatgaaggcaccaagaccatcgccaataaccttaccagcacgattcaggtctttacggactcggaataccagctcccgtacgtcctcggctctgcgcaccagggctgcctgcctccgttcccggcggacgtcttcatgattcctcagtacgggtacctgactctgaacaacggcagtcaggccgtgggccgttcctccttctactgcctggagtactttccttctcaaatgctgagaacgggcaacaactttgagttcagctaccagtttgaggacgtgccttttcacagcagctacgcgcacagccaaagcctggaccggctgatgaaccccctcatcgaccagtacctgtactacctgtctcggactcagtccacgggaggtaccgcaggaactcagcagttgctattttctcaggccgggcctaataacatgtcggctcaggccaaaaactggctacccgggccctgctaccggcagcaacgcgtctccacgacactgtcgcaaaataacaacagcaactttgcttggaccggtgccaccaagtatcatctgaatggcagagactctctggtaaatcccggtgtcgctatggcaacgcacaaggacgacgaagagcgattttttccatccagcggagtcttgatgtttgggaaacagggagctggaaaagacaacgtggactatagcagcgttatgctaaccagtgaggaagaaatcaaaaccaccaacccagtggccacagaacagtacggcgtggtggccgataacctgcaacagcaaaacgccgctcctattgtaggggccgtcaacagtcaaggagccttacctggcatggtctggcagaaccgggacgtgtacctgcagggtcctatctgggccaagattcctcacacggacggcaactttcatccttcgccgctgatgggaggctttggactgaaacacccgcctcctcagatcctgattaagaatacacctgttcccgcggatcctccaactaccttcagtcaagccaagctggcgtcgttcatcacgcagtacagcaccggacaggtcagcgtggaaattgaatgggagctgcagaaagagaacagcaagcgctggaacccagagattcagtatacttccaactactacaaatctacaaatgtggactttgctgtcaatactgagggtacttattcagagcctcgccccattggcacccgttacctcacccgtaacctgtaattgcctgttaatcaataaaccggttaattcgtttcagttgaactttggtctctgcgaagggcgaattcgtttaaacctgcaggactagtccctttagtgagggttaattctgagcttggcgtaatcatgggtcatag

SEQ ID NO: 404 - protein, 735 aa, Adeno-associated virus
MAADGYLPDWLEDNLSEGIREWWDLKPGAPKPKANQQKQDDGRGLVLPGYKYLGPFNGLDKGEPVNEADAAALEHDKAYDKQLEQGDNPYLKYNHADAEFQERLQEDTSFGGNLGRAVFQAKKRVLEPLGLVEEGAKTAPGKKRPVEPSPQRSPDSSTGIGKTGQQPAKKRLNFGQTGDSESVPDPQPIGEPPAGPSGLGSGTMAAGGGAPMADNNEGADGVGSSSGNWHCDSTWLGDRVITTSTRTWALPTYNNHLYKQISNGTSGGSTNDNTYFGYSTPWGYFDFNRFHCHFSPRDWQRLINNNWGFRPRKLRFKLFNIQVKEVTTDDGVTTIANNLTSTIQVFSDSEYQLPYVLGSAHQGCLPPFPADVFMIPQYGYLTLNNGSQSVGRSSFYCLEYFPSQMLRTGNNFEFSYTFEEVPFHSSYAHSQSLDRLMNPLIDQYLYYLARTQSTTGSTRELQFHQAGPNTMAEQSKNWLPGPCYRQQRLSKNIDSNNNSNFAWTGATKYHLNGRNSLTNPGVAMATNKDDEDQFFPINGVLVFGKTGAANKTTLENVLMTSEEEIKTTNPVATEEYGVVSSNLQSSTAGPQTQTVNSQGALPGMVWQNRDVYLQGPIWAKIPHTDGNFHPSPLMDGFGLKHPPPQILIKNTPVPANPPEVFTPAKFASFITQYSTGQVSVEIEWELQKENSKRWNPEIQYTSNYAKSNNVEFAVNNEGVYTEPRPIGTRYLTRNL

SEQ ID NO: 405 - DNA, 3276 bp, Adeno-associated virus
gaattcgcccttcgcagagaccaaagttcaactgaaacgaattaaccggtttattgattaacaggcaattacaggttacgggtgaggtaacgggtgccaatggggcgaggctcagtataaaccccttcgttgttgacagcaaattccacattattagacttggcataatttgaggtgtactgaatctctggattccagcgtttgctgttttctttctgcagttcccactcgatctccacgctgacctggccggtgctgtactgcgtgataaatgaggcaaacttggcaggagtaaacacctctggaggattagcaggtaccggggtgtttttgatgagaatttgaggaggcgggtgtttgagtccaaatccgtccatcaggggagacgggtgaaagttgccgtccgtgtgaggaattttggcccagatgggaccctgcaggtacacgtcccggttctgccagaccatgccgggcagagccccctggctgttgacagtctgtgtctggggtccggccgtagacgattgcaggttgctggagaccacaccgtattcttctgtagccacgggattggtggttttgatctcctcctcgctggtcattagcacgttttccagcgttgtcttgttggcagcccccgttttgccaaaaaccagcactccgttgatgggaaagaactggtcctcgtcgtccttgttggtggccatggctacgcccgggttggttaatgaatttctaccattcagatggtatttagtggccccggtccaggcaaagttactgttgttgttgctgtctatgttttttgacagtctctgctgccgataacagggtccgggcagccagttctttgattgctcggccatggtgttgggcccagcctgatggaactgcagctcccttgtggaccccgtagtgctctgggtccgggccaggtagtacaggtactggtcgatgaggggattcatcagccggtccaggctctggctatgcgcatagctgctgtggaaaggcacttcctcaaaggtgtagctgaattcaaagttattgcccgttctcagcatctgagaaggaaagtactccaggcagtagaaggaggaacgtcccacagactgactgccgttgtttagagtcagatatccgtactgaggaatcatgaacacgtccgcagggaacggagggaggcagccctggtgcgcagagccgaggacgtacggcagttggtactccgagtccgagaagacctgaatcgtgctggtaaggttattagcgatggtcgtaacgccgtcgtccgtcgtgacctccttgacctggatgttgaacaacttgaaccgcagctttctgggccggaatccccagttgttgttgatgagtcgctgccagtcacgtggtgagaagtggcagtggaatctgttaaagtcaaaatacccccagggggtgctgtagccgaagtaggtgttgtcgttggtgcttcctcccgatgtcccgttggagatttgcttgtagaggtggttgttgtaggtggggagggcccaggttcgggtgctggtggtgatgactctgtcgcccagccatgtggaatcgcaatgccaatttcctgaggaactacccactccgtcggcgccttcgttattgtctgccattggagcgccaccgcctgcagccattgtaccagatcccagaccagaggggcctgcggggggttctccgattggttgagggtcgggcactgactctgagtcgccagtctgcccaaagttgagtctctttttcgcgggctgctggcctgtcttgccgatgcccgtagaggagtctggagaacgctggggtgatggctctaccggtctcttctttccaggagccgtcttagcgccttcctcaaccagaccgagaggttcgagaacccgcttcttggcctggaagactgctcgcccgaggttgcccccaaaagacgtatcttcttgaagacgctcctgaaactcggcgtcggcgtggttgtacttgaggtacgggttgtccccctgctcgagctgcttgtcgtaggccttgtcgtgctcgagggccgcggcgtctgcctcgttgaccggctctcccttgtcgagtccgttgaagggtccgaggtacttgtagccaggaagcaccagaccccggccgtcgtcctgcttttgctggttggctttgggtttcggggctccaggtttcaagtcccaccactcgcgaatgccctcagagaggttgtcctcgagccaatctggaagataaccatcggcagccatacctggtttaagtcatttattgctcagaaacacagtcatccaggtccacgttgaccagatcgcaggccgagcaagcaatctcgggagcccgccccagcagatgatgaatggcacagagtttccgatacgtcctctttctgacgaccggttgagattctgacacgccggggaaacattctgaacagtctctggtcccgtgcgtgaagcaaatgttgaaattctgattcattctctcgcatgtcttgcagggaaacagcatctgaagcatgcccgcgtgacgagaacacttgttttggtacctgtcggcaaagtccaccggagctccttccgcgtctgacgtcgatggatgcaaaatgtcgcaaaagcactcacgtgacagctaatacaggaccactcccctatgacgtgatttacgtcagcgctatgcccgcgtgacgagaacatttgttttggtacctgtcggcaaagtccaccggagctccttccgcgtctgacgtcgatggatccgcgactgaggggcaggcccgcttgggctcgcttttatccgcgtcatcgggggcgggtctcttgttggctccaccctttctgacgtagaactcatgcgccacctcggtcacgtgatcctgcgcccagcggaagaactctttgacttcctgctttgtcaccttgccaaagtcatgctccagacggcgggtgagttcaaatttgaacatccggtcctgcaacggctgctggtgctcgaaggtggtgctgttcccgtcaatcacggcgcacatgttggtgttggaagtgacgatcacgggggtgggatcgatctgggcggaagacttgcacttttggtccacgcgcaccttgctgccgccgagaatggccttggcggactccacgaccttggccgtcatcttgccctcctcccaccagatcaccatcttgtcgacgcaatcgttgaagggaaagttctcattggtccagttgacgcagccgtagaaagggcgaattc

SEQ ID NO: 406 - protein, 738 aa, Adeno-associated virus; identical to SEQ ID NO: 71

SEQ ID NO: 407 - protein, 738 aa, Adeno-associated virus
MAADGYLPDWLEDNLSEGIREWWDLKPGAPKPKANQQKQDDGRGLVLPGYKYLGPFNGLDKGEPVNAADAAALEHDKAYDQQLKAGDNPYLRYNHADAEFQERLQEDTSFGGNLGRAVFQAKKRVLEPLGLVEEGAKTAPGKKRPVEPSPQRSPDSSTGIGKKGHQPARKRLNFGQTGDSESVPDPQPIGEPPAGPSGLGSGTMAAGGGAPMADNNEGADGVGSSSGNWHCDSTWLGDRVITTSTRTWALPTYNNHLYKQISNGTSGGSTNDNTYFGYSTPWGYFDFNRFHCHFSPRDWQRLINNNWGFRPKRLNFKLFNIQVKEVTQNEGTKTIANNLTSTIQVFTDSEYQLPYVPGSAHQGCLPPFPADVFMIPQYGYLTLNNGSQAVGRSSFYCLEYFPSQMLRTGNNFEFSYTFEDVPFHSSYAHSQSLDRLMNPLIDQYLYYLSRTQSTGGTQGTQQLLFSQAGPANMSAQAKNWLPGPCYRQQRVSTTLSQNNNSNFAWTGATKYHLNGRDSLVNPGVAMATHKDDEERFFPSSGVLMFGKQGAGKDNVDYSSVMLTSEEEIKTTNPVATEQYGVVADNLQQTNGAPIVGTVNSQGALPGMVWQNRDVYLQGPIWAKIPHTDGNFHPSPLMGGFGLKHPPPQILIKNTPVPADPPTTFSQAKLASFITQYSTGQVSVEIEWELQKENSKRWNPEIQYTSNYYKSTNVDFAVNTEGTYSEPRPIGTRYLTRNL

SEQ ID NO: 408 - protein, 738 aa, Adeno-associated virus; identical to SEQ ID NO: 69

SEQ ID NO: 409 - protein, 728 aa, Adeno-associated virus
MAADGYLPDWLEDNLSEGIREWWDLKPGAPKPKANQQKQDDGRGLVLPGYKYLGPFNGLDKGEPVNEADAAALEHDKAYDKQLEQGDNPYLKYNHADAEFQERLQEDTSFGGNLGRAVFQAKKRVLEPLGLVEEGAKTAPGKKRPIESPDSSTGIGRKGQQPAKKKLNFGQTGDSESVPDPQPIGEPPAGPSGLGSGTMAAGGGAPMADNNEGADGVGNASGNWHCDSTWLGDRVITTSTRTWALPTYNNHLYKQISSQSGATNDNHFFGYSTPWGYFDFNRFHCHFSPRDWQRLINNNWGFRPRKLRFKLFNIQVKEVTTNDGVTTIANNLTSTIQVFSDSEYQLPYVLGSAHQGCLPPFPADVFMIPQYGYLTLNNGSQSVGRSSFYCLEYFPSQMLRTGNNFEFSYTFEEVPFHSSYAHSQSLDRLMNPLIDQYLYYLARTQSTTGSTRELQFHQAGPNTMAEQSKNWLPGPCYRQQRLSKNIDSNNNSNFAWTGATKYHLNGRNSLTNPGVAMATNKDDEDQFFPINGVLVFGKTGAANKTTLENVLMTSEEEIKTTNPVATEEYGVVSSNLQSSTAGPQTQTVNSQGALPGMVWQNRDVYLQGPIWAKIPHTDGNFHPSPLMGGFGLKHPPPQILIKNTPVPANPPEVFTPAKFASFITQYSTGQVSVEIEWELQKENSKRWNPEIQYTSNYAKSNNVEFAVNNEGVYTEPRPIGTRYLTRNL

SEQ ID NO: 410 - DNA, 2489 bp, Adeno-associated virus
gaattcgccctttctacggctgcgtcaactggaccaatgagaactttcccttcaacgattgcgtcgacaagatggtgatctggtgggaggagggcaagatgacggccaaggtcgtgaagtccgccaaggccattcatcatctgctggggcgggctcccgagattgcttgctcggcctgcgatctggtcaacgtggacctggatgactgtgtttctgagcaataaatgacttaaaccaggtatggctgccgatggttatcttccagattggctcgaggacaacctctctgagggcattcgcgagtggtgggacttgaaacctggagccccgaaacccaaagccaaccagcaaaagcaggacgacggccggggtctggtgcttcctggctacaagtacctcggacccttcaacggactcgacaagggagagccggtcaacgaggcagacgccgcggccctcgagcacgacaaggcctacgacaagcagctcgagcagggggacaacccgtacctcaagtacaaccacgccgacgccgagtttcaggagcgtcttcaagaagatacgtcttttgggggcaacctcgggcgagcagtcttccaggccaagaagcgggttctcgaacctctcggtctggttgaggaaggcgctaagacggctcctggaaagaagagacccatagaatcccccgactcctccacgggcatcggcaggaaaggccagcagcccgctaaaaagaagctcaactttgggcagactggcgactcagagtcagtgcccgaccctcaaccaatcggagaaccccccgcaggcccctctggtctgggatctggtacaatggctgcaggcggtggcgctccaatggcagacaataacgaaggcgccgacggagtgggtaatgcctccggaaattggcattgcgattccacatggctgggcgacagagtcatcaccaccagcacccgcacctgggccctgcccacctacaacaaccacctctacaagcagatatcaagtcagagcggggctaccaacgacaaccacttcttcggctacagcaccccctggggctattttgacttcaacagattccactgccacttctcaccacgtgactggcagcgactcatcaacaacaactggggattccggcccagaaagctgcggttcaagttgttcaacatccaggtcaaggaggtcacgacgaacgacggcgttacgaccatcgccaataaccttaccagcacgattcaggtcttctcggactcggagtaccaactgccgtacgtcctcggctctgcgcaccagggctgcctccctccgttccctgcggacgtgttcatgattcctcagtacggatatctgactctaaacaacggcagtcagtctgtgggacgttcctccttctactgcctggagtactttccttctcagatgctgagaacgggcaataactttgaattcagctacacctttgaggaagtgcctttccacagcagctatgcgcacagccagagcctggaccggctgatgaatcccctcatcgaccagtacctgtactacctggcccggacccagagcactacggggtccacaagggagctgcagttccatcaggctgggcccaacaccatggccgagcaatcaaagaactggctgcccggaccctgttatcggcagcagagactgtcaaaaaacatagacagcaacaacaacagtaactttgcctggaccggggccactaaataccatctgaatggtagaaattcattaaccaacccgggcgtagccatggccaccaacaaggacgacgaggaccagttctttcccatcaacggagtgctggtttttggcaaaacgggggctgccaacaagacaacgctggaaaacgtgctaatgaccagcgaggaggagatcaaaaccaccaatcccgtggctacagaagaatacggtgtggtctccagcaacctgcaatcgtctacggccggaccccagacacagactgtcaacagccagggggctctgcccggcatggtctggcagaaccgggacgtgtacctgcagggtcccatctgggccaaaattcctcacacggacggcaactttcacccgtctcccctgatgggcggatttggactcaaacacccgcctcctcaaattctcatcaaaaacaccccggtacctgctaatcctccagaggtgtttactcctgccaagtttgcctcatttatcacgcagtacagcaccggccaggtcagcgtggagatcgagtgggaactgcagaaagaaaacagcaaacgctggaatccagagattcagtacacctcaaattatgccaagtctaataatgtggaatttgctgtcaacaacgaaggggtttatactgagcctcgccccattggcacccgttacctcacccgtaacctgtaattgcctgttaatcaataaaccggttaattcgtttcagttgaactttggtcaagggcgaattc

SEQ ID NO: 411 - protein, 728 aa, Adeno-associated virus
MAADGYLPDWLEDNLSEGIREWWDLKPGAPKPKANQQKQDDGRGLVLPGYKYLGPFNGLDKGEPVNAADAAALEHDKAYDQQLKAGDNPYLRYNHADAEFQERLQEDTSFGGNLGRAVFQAKKRVLEPLGLVEEGAKTAPGKKRPIESPDSSTGIGKKGQQPAKKKLNFGQTGDSESVPDPQPIGEPPAGPSGLGSGTMAAGGGAPMADNNEGADGVGNASGNWHCDSTWLGDRVITTSTRTWALPTYNNHLYKQISSQSGATNDNHFFGYSTPWGYFDFNRFHCHFSPRDWQRLINNNWGFRPRKLRFKLFNIQVKEVTTNDGVTTIANNLTSTIQVFSDSEYQLPYVLGSAHQGCLPPFPADVFMIPQYGYLTLNNGSQSVGRSSFYCLEYFPSQMLRTGNNFEFSYTFEEVPFHSSYAHSQSLDRLMNPLIDQYLYYLARTQSTTGSTRELQFHQAGPNTMAEQSKNWLPGPCYRRQRLSKDIDSNNNSNFAWTGATKYHLNGRNSLTNPGVAMATNKDDEDQFFPINGVLVFGKTGAANKTTLENVLMTSEEEIKTTNPVATEEYGVVSSNLQSSTAGPQTQTVNSQGALPGMVWQNRDVYLQGPIWAKIPHTDGNFHPSPLMGGFGLKHPPPQILIKNTPVPANPPEVFTPAKFASFITQYSTGQVSVEIEWELQKENSKRWNPEIQYTSNYAKSNNVEFAVNNEGVYTEPRPIGTRYLTRNL

SEQ ID NO: 412 - DNA, 3098 bp, Adeno-associated virus
gaattcgccctttctacggctgcgtcaactggaccaatgagaactttcccttcaacgattgcgtcgacaagatggtgatctggtgggaggagggcaagatgacggccaaggtcgtggagtccgccaaggccattctcggcggcagcaaggtgcgcgtggaccaaaagtgcaagtcttccgcccagatcgatcccacccccgtgatcgtcacttccaacaccaacatgtgcgccgtgattgacgggaacagcaccaccttcgagcaccagcagccgttacaagaccggatgttcaaatttgaactcacccgccgtctggagcacgactttggcaaggtgacaaagcaggaagtcaaagagttcttccgctgggcgcaggatcacgtgaccgaggtggcgcatgagttctacgtcagaaagggtggagccaacaagagacccgcccccgatgacgcggataaaagcgagcccaagcgggcctgcccctcagtcgcggatccatcgacgtcagacgcggaaggagctccggtggactttgccgacaggtaccaaaacaaatgttctcgtcacgcgggcatgcttcagatgctgtttccctgcaagacatgcgagagaatgaatcagaatttcaacatttgcttcacgcacgggaccggagactgttcagaatgtttccccggcgtgtcagaatctcaaccggtcgtcagaaagaggacgtatcggaaactctgtgccattcatcatctgctggggcgggctcccgagattgcttgctcggcctgcgatctggtcaacgtggacctggatgactgtgtttctgagcaataaatgacttaaaccaggtatggctgccgatggttatcttccagattggctcgaggacaacctctctgagggcattcgcgagtggtgggacttgaaacctggagccccgaaacccaaagccaaccagcaaaagcaggacgacggccggggtctggtgcttcctggctacaagtacctcggacccttcaacggactcgacaagggagagccggtcaacgcggcggacgcagcggccctcgagcacgacaaggcctacgaccagcagctcaaagcgggtgacaatccgtacctgcggtataaccacgccgacgccgagtttcaggagcgtcttcaagaagatacgtcttttgggggcaacctcgggcgagcagtcttccaggccaagaagcgggttctcgaacctctcggtctggttgaggaaggcgctaagacggctcctggaaagaagagacccatagaatcccccgactcctccacgggcatcggcaagaaaggccagcagcccgctaaaaagaagctcaactttgggcagactggcgactcagagtcagtgcccgaccctcaaccaatcggagaaccccccgcaggcccctctggtctgggatctggtacaatggctgcaggcggtggcgctccaatggcagacaataacgaaggcgccgacggagtgggtaatgcctccggaaattggcattgcgattccacatggctgggcgacagagtcatcaccaccagcacccgcacctgggccctgcccacctacaacaaccacctctacaagcagatatcaagtcagagcggggctaccaacgacaaccacttcttcggctacagcaccccctggggctattttgacttcaacagattccactgccacttctcaccacgtgactggcagcgactcatcaacaacaactggggattccggcccagaaagctgcggttcaagttgttcaacatccaggtcaaggaggtcacgacgaacgacggcgttacgaccatcgctaataaccttaccagcacgattcaggtcttctcggactcggagtaccaactgccgtacgtcctcggctctgcgcaccagggctgcctccctccgttccctgcggacgtgttcatgattcctcagtacggatatctgactctaaacaacggcagtcagtctgtgggacgttcctccttctactgcctggagtactttccttctcagatgctgagaacgggcaataactttgaattcagctacacctttgaggaagtgcctttccacagcagctatgcgcacagccagagcctggaccggctgatgaatcccctcatcgaccagtacctgtactacctggcccggacccagagcactacggggtccacaagggagctgcagttccatcaggctgggcccaacaccatggccgagcaatcaaagaactggctgcccggaccctgttatcggcggcagagactgtcaaaagacatagacagcaacaacaacagtaactttgcctggaccggggccactaaataccatctgaatggtagaaattcattaaccaacccgggcgtagccatggccaccaacaaggacgacgaggaccagttctttcccatcaacggagtgctggtttttggcaaaacgggggctgccaacaagacaacgctggaaaacgtgctaatgaccagcgaggaggagatcaaaaccaccaatcccgtggctacagaagaatacggtgtggtctccagcaacctgcaatcgtctacggccggaccccagacacagactgtcaacagccagggggctctgcccggcatggtctggcagaaccgggacgtgtacctgcagggtcccatctgggccaaaattcctcacacggacggcaactttcacccgtctcccctgatgggcggatttggactcaaacacccgcctcctcaaattctcatcaaaaacaccccggtacctgctaatcctccagaggtgtttactcctgccaagtttgcctcatttatcacgcagtacagcaccggccaggtcagcgtggagatcgagtgggaactgcagaaagagaacagcaaacgctggaatccagagattcagtacacctcaaattatgccaagtctaataatgtggaatttgctgtcaacaacgaaggggtttatactgagcctcgccccattggcacccgttacctcacccgtaacctgtaattacttgttaatcaataaaccggttgattcgtttcagttgaactttggtctctgcgaagggcgaattc

SEQ ID NO: 413 - protein, 685 aa, Adeno-associated virus
MAADGYLPDWLEDNLSEGIREWWDLKPGAPKPKANQQKQDDGRGLVLPGYKYLGPFNGLDKGEPVNEADAAALEHDKAYDKQLEQGDNPYLKYNHADAEFQERLQEDTSFGGNLGRAVFQAKKRVLEPLGLVEEGAKTAPGKKRPVEPSPQRSPDSSTGIGKTGQQPAKKRLNFGQTGDSESVPDPQPIGEPPAGPSGLGSGTMAAGGGAPMADNNEGADGVGSSSGNWHCDSTWLGDRVITTSTRTWALPTYNNHLYKQISNGTSGGSTNDNTYFGYSTPWGYFDFNRFHCHFSPRDWQRLINNNWGFRPKRLNFKLFNIQVKEVTQNEGTKTIANNLTSTIQVFTDSEYQLPYVLGSAHQGCLPPFPADVFMIPQYGYLTLNNGSQAVGRSSFYCLEYFPSQMLRTGNNFEFSYQFEDVPFHSSYAHSQSLDRLTNPLIDQYLYYLARTQSTTGSTRGLQFHQAGPNTMAEQSKNWLPGPCYRQQRLSKNIDSNNNSNFAWTGATKYHLNGRNSLTNPGVAMATNKDDEDQFFPINGVLVFGKTGAANKTTLENVLMTSEEEIKTTNPVATEEYGVVSSNLQSSTAGPQTQTVNSQGALPGMVWQNRDVYLQGPIWAKIPHTDGNFHPSPLMGGFGLKHPPPQILIKYTSNYYKSTNVDFAVNTEGTYSEPRPIGTRYLTRNL

SEQ ID NO: 414 - DNA, 2969 bp, Adeno-associated virus
gaattcgccctttctacggctgcgtcaactggaccaatgagaactttcccttcaacgattgcgtcgacaagatggtgatctggtgggaggagggcaagatgacggccaaggtcgtggagtccgccaaggccattctcggcggcagcaaggtgcgcgtggaccaaaagtgcaagtcgtccgcccagatcgaccccacccccgtgatcgtcacctccaacaccaacatgtgcgccgtgattgacgggaacagcaccaccttcgagcaccagcagccgttacaagaccggatgttcaaatttgaactcacccgccgtctggagcacgactttggcaaggtgacaaagcaggaagtcaaagagttcttccgctgggcgcaggatcacgtgaccgaggtggcgcatgagttctacgtcagaaagggtggagccaacaagagacccgcccccgatgacgcggataaaagcgagcccaagcgggcctgcccctcagtcgcggatccatcgacgtcagacgcggaaggagctccggtggactttgccgacaggtaccaaaacaaatgttctcgtcacgcgggcatgcttcagatgctgtttccctgcaagacatgcgagagaatgaatcagaatttcaacatttgcttcacgcacgggaccagagactgttcagaatgtttccccggcgtgtcagaatctcaaccggtcgtcagaaagaggacgtatcggaaactctgtgccattcatcatctgctggggcgggctcccgagattgcttgctcggcctgcgatctggtcaacgtggacctggatgactgtgtttctgagcaataaatgacttaaaccaggtatggctgccgatggttatcttccagattggctcgaggacaacctctctgagggcatccgcgagtggtgggacttgaaacctggagccccgaaacccaaagccaaccagcaaaagcaggacgacggccggggtctggtgcttcctggctacaagtacctcggacccttcaacggactcgacaagggagagccggtcaacgaggcagacgccgcggccctcgagcacgacaaggcctacgacaagcagctcgagcagggggacaacccgtacctcaagtacaaccacgccgacgccgagtttcaggagcgtcttcaagaagatacgtcttttgggggcaacctcgggcgagcagtcttccaggccaagaagcgggttctcgaacctctcggtctggttgaggaaggcgctaagacggctcctggaaagaagagaccggtagagccatcaccccagcgttctccagactcctctacgggcatcggcaagacaggccagcagcccgcgaaaaagagactcaactttgggcagactggcgactcagagtcagtgcccgaccctcaaccaatcggagaaccccccgcaggcccctctggtctgggatctggtacaatggctgcaggcggtggcgctccaatggcagacaataacgaaggcgccgacggagtgggtagttcctcaggaaattggcattgcgattccacatggctgggcgacagagtcatcaccaccagcacccgaacctgggccctccccacctacaacaaccacctctacaagcaaatctccaacgggacatcgggaggaagcaccaacgacaacacctacttcggctacagcaccccctgggggtattttgactttaacagattccactgccacttctcaccacgtgactggcagcgactcatcaacaacaactggggattccggcccaagagactcaacttcaagctcttcaacatccaggtcaaggaggtcacgcagaatgaaggcaccaagaccatcgccaataaccttaccagcacgattcaggtctttacggactcggaataccagctcccgtacgtcctcggctctgcgcaccagggctgcctgcctccgttcccggcggacgtcttcatgattcctcagtacgggtacctgactctgaacaacggcagtcaggccgtgggccgttcctccttctactgcctggagtactttccttctcaaatgctgagaacgggcaacaactttgagttcagctaccagtttgaggacgtgccttttcacagcagctacgcgcacagccaaagcctggaccggctgacgaaccccctcatcgaccagtacctgtactacctggcccggacccagagcactacggggtccacaagggggctgcagttccatcaggctgggcccaacaccatggccgagcaatcaaagaactggctgcccggaccctgttatcggcagcagagactgtcaaaaaacatagacagcaacaacaacagtaactttgcctggaccggggccactaaataccatctgaatggtagaaattcattaaccaacccgggcgtagccatggccaccaacaaggacgacgaggaccagttctttcccatcaacggagtgctggtttttggcaaaacgggggctgccaacaagacaacgctggaaaacgtgctaatgaccagcgaggaggagatcaaaaccaccaatcccgtggctacagaagaatacggtgtggtctccagcaacctgcaatcgtctacggccggaccccagacacagactgtcaacagccagggggctctgcccggcatggtctggcagaaccgggacgtgtacctgcagggtcccatctgggccaaaattcctcacacggacggcaactttcacccgtctcccctgatgggcggatttggactcaaacacccgcctcctcaaattctcatcaagtatacttccaactactacaaatctacaaatgtggactttgctgtcaatactgagggtacttattcagagcctcgccccattggcacccgttacctcacccgtaacctgtaattgcctgttaatcaataaaccggttaattcgtttcagttgaactttggtctctgcgaagggcgaattc

SEQ ID NO: 415 - protein, 733 aa, Adeno-associated virus
MAADGYLPDWLEDNLSEGIREWWDLKPGAPKPKANQQKQDDGRGLVLPGYKYLGPFNGLDKGEPVNAADAAALEHDKAYDQQLKAGDNPYLRYNHADAEFQERLQEDTSFGGNLGRAVFQAKKRVLEPLGLVEEGAKTAPGKKRPIESPDSSTGIGKKGQQPAKKKLNFGQTGDSESVPDPQPIGEPPAGPSGLGSGTMAAGGGAPMADNNEGADGVGSSSGNWHCDSTWLGDRVITTSTRTWALPTYNNHLYKQISNGTSGGSTNDNTYFGYSTPWGYFDFNRFHCHFSPRDWQRLINNNWGFRPKRLNFKLFNIQVKEVTQNEGTKTIANNLTSTIQVFTDSEYQLPYVLGSAHQGCLPPFPADVFMIPQYGYLTLNNGSQAVGRSSFYCLEYFPSQMLRTGNNFEFSYQFEDVPFHSSYAHSQSLDRLMNPLIDQYLYYLSRTQSTGGTAGTQQLLFSQAGPNNMSAQAKNWLPGPCYRQQRVSTTVSQNNNSNFAWTGATKYHLNGRDSLVNPGVAMATHKGDEERFFPSSGVLMFGKQGAGKDNVDYSSVMLTSEEEIKTTNPVATEQYGVVADNLQQQNAAPIVGAVNSQGALPGMVWQNRDVYLQGPIWAKIPHTDGNFHPSPLMGGFGLKHPPPQILIKNTPVPADPPTTFSQAKLASFITQYSTGQVSVEIEWELQKENSKRWNPEIQYTSNYYKSTNVDFAVNTEGTYSEPRPIGTRYLTRSL

SEQ ID NO: 416 - DNA, 3113 bp, Adeno-associated virus
gaattcgccctttctacggctgcgtcaactggaccaatgagaactttcccttcaacgattgcgtcgacaagatggtgatctggtgggaggagggcaagatgacggccaaggtcgtggagtccgccaaggccattctcggcggcagcaaggtgcgcgtggaccaaaagtgcaagtcgtccgcccagatcgatcccacccccgtgatcgtcacttccaacaccaacatgtgcgccgtgattgacgggaacagcaccaccttcgagcaccagcagccgttacaagaccggatgttcaaatttgaactcacccgccgtctggagcatgactttggcaaggtgacaaagcaggaagtcaaagagttcttccgctgggcgcaggatcacgtgaccgaggtggcgcatgagttctacgtcagaaagggtggagccaacaagagacccgcccccgatgacgcggataaaagcgagcccaagcgggcctgcccctcagtcgcggatccatcgacgtcagacgcggaaggagctccggtggactttgccgacaggtaccaaaacaaatgttctcgtcacgcgggcatgcttcagatgctgtttccctgcaagacatgcgagagaatgaatcagaatttcaacatttgcttcacgcacgggaccagagactgttcagaatgtttccccggcgtgtcagaatctcaaccggtcgtcagaaagaggacgtatcggaaactctgtgccattcatcatctgctggggcgggctcccgagattgcttgctcggcctgcgatctggtcaacgtggacctggatgactgtgtttctgagcaataaatgacttaaaccaggtatggctgccgatggttatcttccagattggctcgaggacaacctctctgagggcattcgcgagtggtgggacttgaaacctggagccccgaaacccaaagccaaccagcaaaagcaggacgacggccggggtctggtgcttcctggctacaagtacctcggacccttcaacggactcgacaagggggagcccgtcaacgcggcggacgcagcggccctcgagcacgacaaggcctacgaccagcagctcaaagcgggtgacaatccgtacctgcggtataaccacgccgacgccgagtttcaggagcgtcttcaagaagatacgtcttttgggggcaacctcgggcgagcagtcttccaggccaagaagcgggttctcgaacctctcggtctggttgaggaaggcgctaagacggctcctggaaagaagagacccatagaatcccccgactcctccacgggcatcggcaagaaaggccagcagcccgctaaaaagaagctcaactttgggcagactggcgactcagagtcagtgcccgaccctcaaccaatcggagaaccccccgcaggcccctctggtctgggatctggtacaatggctgcaggcggtggcgctccaatggcagacaataacgaaggcgccgacggagtgggtagttcctcaggaaattggcattgcgattccacatggctgggcgacagagtcatcaccaccagcacccgaacctgggccctccccacctacaacaaccacctctacaagcaaatctccaacgggacatcgggaggaagcaccaacgacaacacctacttcggctacagcaccccctgggggtattttgactttaacagattccactgccacttctcaccacgtgactggcagcgactcatcaacaacaactggggattccggcccaagagactcaacttcaagctcttcaacatccaggtcaaggaggtcacgcagaatgaaggcaccaagaccatcgccaataaccttaccagcacgattcaggtctttacggactcggaataccagctcccgtacgtcctcggctctgcgcaccagggctgcctgcctccgttcccggcggacgtcttcatgattcctcagtacgggtacctgactctgaacaacggcagtcaggccgtgggccgttcctccttctactgcctggagtactttccttctcaaatgctgagaacgggcaacaactttgagttcagctaccagtttgaggacgtgccttttcacagcagctatgcgcacagccaaagcctggaccggctgatgaaccccctcatcgaccagtacctgtactacctgtctcggactcagtccacgggaggtaccgcaggaactcagcagttgctattttctcaggccgggcctaataacatgtcggctcaggccaaaaactggctacccgggccctgctaccggcagcaacgcgtctccacgacagtgtcgcaaaataacaacagcaactttgcttggaccggtgccaccaagtatcatctgaatggcagagactctctggtaaatcccggtgtcgctatggcaacgcacaagggcgacgaagagcgattttttccatccagcggagtcttgatgtttgggaaacagggagctggaaaagacaacgtggactatagcagcgttatgctaaccagtgaggaagaaatcaaaaccaccaacccagtggccacagaacagtacggcgtggtggccgataacctgcaacagcaaaacgccgctcctattgtaggggccgtcaacagtcaaggagccttacctggcatggtctggcagaaccgggacgtgtacctgcagggtcctatctgggccaagattcctcacacggacggcaactttcatccttcgccgctgatgggaggctttggactgaaacacccgcctcctcagatcctgattaagaatacacctgttcccgcggatcctccaactaccttcagtcaagccaagctggcgtcgttcatcacgcagtacagcaccggacaggtcagcgtggaaattgaatgggagctgcagaaagagaacagcaagcgctggaacccagagattcagtatacttccaactactacaaatctacaaatgtggactttgctgtcaatactgagggtacttattcagagcctcgccccattggcacccgttacctcacccgtagcctgtaattgcctgttaatcaataaaccggttgattcgtttcagttgaactttggtctctgcgaagggcgaattc

SEQ ID NO: 417 - protein, 738 aa, Adeno-associated virus
MAADGYLPDWLEDNLSEGIREWWDLKPGAPKPKANQQKQDDGRGLVLPGYKYLGPFNGLDKGEPVNAADAAALEHDKAYDQQLKAGDNPYLRYNHADAEFQERLQEDTSFGGNLGRAVFQAKKRVLEPLGLVEEGAKTAPGKKRPVEPSPQRSPDSSTGIGKTGQQPAKKRLNFGQTGDSESVPDPQPIGEPPAGPSGLGSGTMAAGGGAPMADNNEGADGVGSSSGNWHCDSTWLGDRVITTSTRTWALPTYNNHLYKQISNGTSGGSTNDNTYFGYSTPWGYFDFNRFHCHFSPRDWQRLINNNWGFRPKRLNFKLFNIQVKEVTQNEGTKTIANNLTSTIQVFTDSEYQLPYVLGSAHQGCPPPFPADVFMIPQYGYLTLNNGSQAVGRSSFYCLEYFPSQMRRTGNNFEFSYQFEDVPFHSSYAHSQSLDRLMNPLIDQYLYYLSRTQSTGGTAGTQQLLFSQAGPNNMSAQAKNWLPGPCYRQQRVSTTLSQNNNSNFAWTGATKYHLNGRDSLVNPGVAMATHKDDEERFFPSSGVLMFGKQGAGKDNVDYSSVMLTSEEEIKTTNPVATEQYGVVADNLQQQNAAPIVGAVNSQGALPGMVWQNRDVYLQGPIWAKIPHTDGNFHPSPLMGGFGLKHPPPQILIKNTPVPADPPTTFSQAKLASFITQYSTGQVSVEIEWELQKENSKRWNPEIQYTSNYYKSTNVDFAVNTEGTYSEPRPIGTRYLTRNL

SEQ ID NO: 418 - DNA, 3128 bp, Adeno-associated virus
gaattcgccctttctacggctgcgtcaactggaccaatgagaactttcccttcaacgattgcgtcgacaagatggtgatctggtgggaggagggcaagatgacggccaaggtcgtggagtccgccaaggccattctcggcggcagcaaggtgcgcgtggaccaaaagtgcaagtcgtccgcccagatcgaccccacccccgtgatcgtcacctccaacaccaacatgtgcgccgtgattgacgggaacagcaccaccttcgagcaccagcagccgttgcaggaccggatgttcaaatttgaactcacccgccgtctggagcatgactttggcaaggtgacaaagcaggaagtcaaagagttcttccgctgggcgcaggatcacgtgaccgaggtggcgcatgagttctacgtcagaaagggtggagccaacaagagacccgcccccgatgacgcggataaaagcgagcccaagcgggcctgcccctcagtcgcggatccatcgacgtcagacgcggaaggagctccggtggactttgccgacaggtaccaaaacaaatgttctcgtcacgcgggcatgcttcagatgctgtttccctgcaagacatgcgagagaatgaatcagaatttcaacatttgcttcacgcgcgggaccagagactgttcagaatgtttcccgggcgtgtcagaatctcaaccggtcgtcagaaagaggacgtatcggaaactctgtgccattcatcatctgctggggcgggctcccgagattgcttgctcggcctgcgatctggtcaacgtggacctggatgactgtgtttctgagcaataaatgacttaaaccaggtatggctgccgatggttatcttccagattggctcgaggacaacctctctgagggcattcgcgagtggtgggacttgaaacctggagccccgaaacccaaagccaaccagcaaaagcaggacgacggccggggtctggtgcttcctggctacaagtacctcggacccttcaacggactcgacaagggggagcccgtcaacgcggcggacgcagcggccctcgagcacgacaaggcctacgaccagcagctcaaagcgggtgacaatccgtacctgcggtataaccacgccgacgccgagtttcaggagcgtctgcaagaagatacgtcttttgggggcaacctcgggcgagcagtcttccaggccaagaagcgggttctcgaacctctcggtctggttgaggaaggcgctaagacggctcctggaaagaagagaccggtagagccatcaccccagcgttctccagactcctctacgggcatcggcaagacaggccagcagcccgcgaaaaagagactcaactttgggcagactggcgactcagagtcagtgcccgaccctcaaccaatcggagaaccccccgcaggcccctctggtctgggatctggtacaatggctgcaggcggtggcgctccaatggcagacaataacgaaggcgccgacggagtgggtagttcctcaggaaattggcattgcgattccacatggctgggcgacagagtcatcaccaccagcacccgaacctgggccctccccacctacaacaaccacctctacaagcaaatctccaacgggacatcgggaggaagcaccaacgacaacacctacttcggctacagcaccccctgggggtattttgactttaacagattccactgccacttctcaccacgtgactggcagcgactcatcaacaacaactggggattccggcccaagagactcaacttcaagctcttcaacatccaggtcaaggaggtcacgcagaatgaaggcaccaagaccatcgccaataaccttaccagcacgattcaggtctttacggactcggaataccagctcccgtacgtcctcggctctgcgcaccagggctgcccgcctccgttcccggcggacgtcttcatgattcctcagtacgggtacctgactctgaacaacggcagtcaggccgtgggccgttcctccttctactgcctggagtactttccttctcaaatgcggagaacgggcaacaactttgagttcagctaccagtttgaggacgtgccttttcacagcagctacgcgcatagccaaagcctggaccggctgatgaaccccctcatcgaccagtacctgtactacctgtctcggactcagtccacgggaggtaccgcaggaactcagcagttgctattttctcaggccgggcctaataacatgtcggctcaggccaaaaactggctacccgggccctgctaccggcagcaacgcgtctccacgacactgtcgcaaaataacaacagcaactttgcttggaccggtgccaccaagtatcatctgaatggcagagactctctggtaaatcccggtgtcgctatggcaacgcacaaggacgacgaagagcgattttttccatccagcggagtcttgatgtttgggaaacagggagctggaaaagacaacgtggactatagcagcgttatgctaaccagtgaggaagaaatcaaaaccaccaacccagtggccacagaacagtacggcgtggtggccgataacctgcaacagcaaaacgccgctcctattgtaggggccgtcaacagtcaaggagccttacctggcatggtctggcagaaccgggacgtgtacctgcagggtcctatctgggccaagattcctcacacggacggcaactttcatccttcgccgctgatgggaggctttggactgaaacacccgcctcctcagatcctgattaagaatacacctgttcccgcggatcctccaactaccttcagtcaagccaagctggcgtcgttcatcacgcagtacagcaccggacaggtcagcgtggaaattgaatgggagctgcagaaagagaacagcaagcgctggaacccagagattcagtatacttccaactactacaaatctacaaatgtggactttgctgtcaatactgagggtacttattcagagcctcgccccattggcacccgttacctcacccgtaacctgtaattgcctgttaatcaataaaccggttaattcgtttcagttgaactttggtctctgcgaagggcgaattc

SEQ ID NO: 419 - protein, 738 aa, Adeno-associated virus; identical to SEQ ID NO: 407

SEQ ID NO: 420 - DNA, 1933 bp, Adeno-associated virus
  modified_base (1302)..(1302): n = a, c, t, or g
  misc_feature (1302)..(1302): n is a, c, g, or t
caaggcctacgaccagcagctcaaagcgggtgacaatccgtacctgcggtataaccacgccgacgccgagtttcaggagcgtcttcaagaagatacgtcttttgggggcaacctcgggcgagcagtcttccaggccaaaaagcgggttctcgaacctcttggtctggttgagacgccagctaagacggcacctggaaagaagcgaccggtagactcgccagactccacctcgggcatcggcaagaaaggccagcagcccgcgaaaaagagactcaactttgggcagactggcgactcagagtcagtccccgaccctcaaccaatcggagaaccaccagcaggcccctctggtctgggatctggtacaatggctgcaggcggtggcgcaccaatggctgacaataacgagggcgccgacggagtgggtaatgcctcaggaaattggcattgcgattccacatggctgggcgacagagtcatcaccaccagcacccgaacctgggccctgcccacctacaacaaccacctctacaagcaaatctccagtcagtcagcagggagcaccaacgataacgtctatttcggctacagcaccccctgggggtattttgacttcaacagattccattgccacttctcaccacgtgactggcagcgacttatcaacaacaactggggattccggcccaagaagctcaacttcaagctcttcaacatccaggtcaaggaggtcacgacgaatgacggtgtcacaaccatcgctaataaccttaccagcacggttcaggtcttttcggactcggaatatcaactgccgtacgtcctcggctccgcgcaccagggctgcctgcctccgttcccggcagacgtgttcatgattccgcagtacggatacctgactctgaacaatggcagccaatcggtaggccgttcctccttctactgcctggagtactttccttctcagatgctgagaacgggcaacaacttcacctttagctacaccttcgaggacgtgcctttccacagcagctacgcgcacagccagagtctggaccggctgatgaatcccctcatcgaccagtacctgtactacttggccagaacacagagcaacgcaggaggtactgctggcaatcgggaactgcagttttatcagggcggacctaccaccatggccgaacaagcaaagaactggctgcccggaccttgcttccggcaacagagagtatccaagacgctggatcaaaataacaacagcaactttgcctggactggtgccacaaaataccatttaaatgnaagaaattcattggttaatcccggtgtcgccatggcaacccacaaggacgacgaggaacgcttcttcccttcgagcggagttctaatttttggcaaaactggagcagctaataaaactacattagaaaacgtgctcatgacaaatgaagaagaaattcgtcctaccaacccggtagctaccgaggaatacgggattgtaagcagcaacttgcaggcggctagcaccgcagcccagacacaagttgttaacaaccagggagccttacctggcatggtctggcagaaccgggacgtgtacctgcaaggtcccatttgggccaagattcctcacacggacggcaactttcacccgtctcctctaatgggtggctttggactgaaacacccgcctccccagatcctgatcaaaaacacaccggtacctgctaatcctccagaagtgtttactcctgccaagtttgcttccttcatcacgcagtacagcaccgggcaagtcagcgttgagatcgagtgggagctgcagaaagagaacagcaagcgctggaacccagagattcagtacacctccaactttgacaaacagactggagtggactttgctgttgacagccagggtgtttactctgagcct

SEQ ID NO: 421 - protein, 733 aa, Adeno-associated virus
MAADGYLPDWLEDNLSEGIREWWDLKPGAPKPKANQQKQDDGRGLVLPGYKYLGPFNGLDKGEPVNAADAAALEHDKAYDQQLKAGDNPYLRYNHADAEFQERLQEDTSFGGNLGRAVFQAKKRVLEPLGLVEEGAKTAPGKKRPLESPQEPDSSSGIGKKGKQPAKKRLNFEEDTGAGDGPPEGSDTSAMSSDIEMRAAPGGNAVDAGQGSDGVGNASGDWHCDSTWSEGKVTTTSTRTWVLPTYNNHLYLRLGTTSNSNTYNGFSTPWGYFDFNRFHCHFSPRDWQRLINNNWGLRPKAMRVKIFNIQVKEVTTSNGETTVANNLTSTVQIFADSSYELPYVMDAGQEGSLSPFPNDVFMVPQYGYCGIVTGENQNQTDRNAFYCLEYFPSQMLRTGNNFEMAYNFGKVPFHSMYAYSQSPDRLMNPLLDQYLWHLQSTTSGETLNQGNAATTFGKIRSGDFAFYRKNWLPGPCVKQQRLSKTASQNYKIPASGGNALLKYDTHYTLNNRWSNIAPGPPMATAGPSDGDFSNAQLIFPGPSVTGNTTTSANNLLFTSEEEIAATNPRDTDMFGQIADNNQNATTAPITGNVTAMGVLPGMVWQNRDIYYQGPIWAKIPHADGHFHPSPLIGGFGLKHPPPQIFIKNTPVPANPATTFTAARVDSFITQYSTGQVAVQIEWEIEKERSKRWNPEVQFTSNYGNQSSMLWAPDTTGKYTEPRVIGSRYLTNHL

SEQ ID NO: 422 - DNA, 3105 bp, Adeno-associated virus
gaattcgcccttgctgcgtcaactggaccaatgagaactttcccttcaacgattgcgtcgacaagatggtgatctggtgggaggagggcaagatgaccgccaaggtcgtggagtccgccaaggccattctgggcggaagcaaggtgcgcgtggaccaaaagtgcaagtcatcggcccagatcgaccccacgcccgtgatcgtcacctccaacaccaacatgtgcgccgtgatcgacgggaacagcaccaccttcgagcaccagcagccgctgcaggaccgcatgttcaagttcgagctcacccgccgtctggagcacgactttggcaaggtgaccaagcaggaagtcaaagagttcttccgctgggctcaggatcacgtgactgaggtggcgcatgagttctacgtcagaaagggcggagccaccaaaagacccgcccccagtgacgcggatataagcgagcccaagcgggcctgcccctcagttgcggagccatcgacgtcagacgcggaagcaccggtggactttgcggacaggtaccaaaacaaatgttctcgtcacgcgggcatgcttcagatgctgtttccctgcaagacatgcgagagaatgaatcagaatttcaacgtctgcttcacgcacggggtcagagactgctcagagtgcttccccggcgcgtcagaatctcaacccgtcgtcagaaaaaagacgtatcagaaactgtgcgcgattcatcatctgctggggcgggcacccgagattgcgtgttcggcccgcgatctcgtcaacgtggacttggatgactgtgtttctgagcaataaatgacttaaaccaggtatggctgctgacggttatcttccagattggctcgaggacaacctctctgagggcattcgcgagtggtgggacctgaaacctggagcccccaagcccaaggccaaccagcagaagcaggacgacggccggggtctggtgcttcctggctacaagtacctcggacccttcaacggactcgacaagggggagcccgtcaacgcggcggacgcagcggccctcgagcacgacaaggcctacgaccagcagctcaaagcgggtgacaatccgtacctgcggtataaccacgccgacgccgagtttcaggagcgtctgcaagaagatacgtcttttgggggcaacctcgggcgagcagtcttccaggccaagaagagggtactcgaacctctgggcctggttgaagaaggtgctaagacggctcctggaaagaagagaccgttagagtcaccacaagagcccgactcctcctcaggaatcggcaaaaaaggcaaacaaccagccaaaaagagactcaactttgaagaggacactggagccggagacggaccccctgaaggatcagataccagcgccatgtcttcagacattgaaatgcgtgcagcaccgggcggaaatgctgtcgatgcgggacaaggttccgatggagtgggtaatgcctcgggtgattggcattgcgattccacctggtctgagggcaaggtcacaacaacctcgaccagaacctgggtcttgcccacctacaacaaccacttgtacctgcggctcggaacaacatcaaacagcaacacctacaacggattctccaccccctggggatactttgactttaacagattccactgtcacttctcaccacgtgactggcaaagactcatcaacaacaactggggactacgaccaaaagccatgcgcgttaaaatcttcaatatccaagttaaggaggtcacaacgtcgaacggcgagactacggtcgctaataaccttaccagcacggttcagatatttgcggactcgtcgtatgagctcccgtacgtgatggacgctggacaagagggaagtctgtctcctttccccaatgacgtcttcatggtgcctcaatatggctactgtggcattgtgactggcgaaaatcagaaccagacggacagaaatgctttctactgcctggagtattttccttcacaaatgctgagaactggcaataactttgaaatggcttacaactttgggaaggtgccgttccactcaatgtatgcttacagccagagcccggacagactgatgaatcccctcctggaccagtacctgtggcacttacagtcgaccacctctggagagactctgaatcaaggcaatgcagcaaccacatttggaaaaatcaggagtggagactttgccttttacagaaagaactggctgcctgggccttgtgttaaacagcagagactctcaaaaactgccagtcaaaattacaagattcctgccagcgggggcaacgctctgttaaagtatgacacccactataccttaaacaaccgctggagcaacatagcgcctggacctccaatggcaacagctggaccttcagatggggacttcagcaacgcccagctcatcttccctggaccatcagtcaccggaaacacaacaacctcagcaaacaatctgttgtttacatcagaagaagaaattgctgccaccaacccaagagacacggacatgtttggtcagattgctgacaataatcagaatgctacaactgctcccataaccggcaacgtgactgctatgggagtgcttcctggcatggtgtggcaaaacagagacatttactaccaagggccaatttgggccaagatcccacacgcggacggacattttcatccttcaccgctaattggcggttttggactgaaacatccgcctccccagatatttatcaaaaacacccccgtacctgccaatcctgcgacaaccttcactgcagccagagtggactctttcatcacacaatacagcaccggccaggtcgctgttcagattgaatgggaaatcgaaaaggaacgctccaaacgctggaatcctgaagtgcagtttacttcaaactatgggaaccagtcttctatgttgtgggctcccgatacaactgggaagtatacagagccgcgggttattggctctcgttatttgactaatcatttgtaactgcctagttaatcaataaaccgtgtgattcgtttcagttgaactttggtctctgcgaagggcgaattc

SEQ ID NO: 423 - protein, 733 aa, Adeno-associated virus
MAADGYLPDWLEDNLSEGIREWWDLKPGAPKPKANQQKQDDGRGLVLPGYKYLGPFNGLDKGEPVNAADAAALEHDKAYDQQLKAGDNPYLRYNHADAEFQERLQEDTSFGGNLGRAVFQAKKRVLEPLGLVEEGAKTAPGKKRPLESPQEPDSSSGIGKKGKQPAKKRLNFEEDTGAGDGPPEGSDTSAMSSDIEMRAAPGGNAVDAGQGSDGVGNASGDWHCDSTWSEGKVTTTSTRTWVLPTYNNHLYLRLGTTSNSNTYNGFSTPWGYFDFNRFHCHFSPRDWQRLINNNWGLRPKAMRVKIFNIQVKEVTTSNGETTVANNLTSTVQIFADSSYELPYVMDAGQEGSLPPFPNDVFMVPQYGYCGIVTGENQNQTDRNAFYCLEYFPSQMLRTGNNFEMAYNFEKVPFHSMYAHSQSLDRLMNPLLDQYLWHLQSTTSGETLNQGNAATTFGKIRSGDFAFYRKNWLPGPCVKQQRFSKTASQNYKIPASGGNALLKYDTHYTLNNRWSNIAPGPPMATAGPSDGDFSNAQLIFPGPSVTGNTTTSANNLLFTSEEEIAATNPRDTDMFGQIADNNQNATTAPITGNVTAMGVLPGMVWQNRDIYYQGPIWAKIPHADGHFHPSPLIGGFGLKHPPPQIFIKNTPVPANPATTFTAARVDSFITQYSTGQVAVQIEWEIEKERSKRWNPEVQFTSNYGNQSSMLWAPDTTGKYTEPRVIGSRYLTNHL

SEQ ID NO: 424 - DNA, 3105 bp, Adeno-associated virus
gaattcgcccttgctgcgtcaactggaccaatgagaactttcccttcaacgattgcgtcgacaagatggtgatctggtgggaggagggcaagatgaccgccaaggtcgtggagtccgccaaggccattctgggcggaagcaaggtgcgcgtggaccaaaagtgcaagtcatcggcccagatcgaccccacgcccgtgatcgtcacctccaacaccaacatgtgcgccgtgatcgacgggaacagcaccaccttcgagcaccagcagccgctgcaggaccgcatgttcaagttcgagctcacccgccgtctggagcacgactttggcaaggtgaccaagcaggaagtcaaagagttcttccgctgggctcaggatcacgtgactgaggtggcgcatgagttctacgtcagaaagggcggagccaccaaaagacccgcccccagtgacgcggatataagcgagcccaagcgggcctgcccctcagttgcggagccatcgacgtcagacgcggaagcaccggtggactttgcggacaggtaccaaaacaaatgttctcgtcacgcgggcatgcttcagatgctgtttccctgcaagacatgcgagagaatgaatcagaatttcaacgtctgcttcacgcacggggtcagagactgctcagagtgcttccccggcgcgtcagaatctcaacccgtcgtcagaaaaaagacgtatcagaaactgtgcgcgattcatcatctgctggggcgggcacccgagattgcgtgttcggcctgcgatctcgtcaacgtggacttggatgactgtgtttctgagcaataaatgacttaaaccaggtatggctgctgacggttatcttccagattggctcgaggacaacctctctgagggcattcgcgagtggtgggacctgaaacctggagcccccaagctcaaggccaaccagcagaagcaggacgacggccggggtctggtgcttcctggctacaagtacctcggacccttccacggactcgacaagggggagcccgtcaacgcggcggacgcagcggccctcgagcacgacaaggcctacgaccagcagctcaaagcgggtgacaatccgtacctgcggtataaccacgccgacgccgagtttcaggagcgtctgcaagaagatacgtcttttgggggcaacctcgggcgagcagtcttccaggccaagaagagggtactcgaaccactgggcctggttgaagaaggtgctaagacggctcctggaaagaagagaccgttagagtcaccacaagagcccgactcctcctcaggaatcggcaaaaaaggcaaacaaccagccaaaaagagactcaactttgaagaggacactggagccggagacggaccccctgaaggatcagataccagcgccatgtcttcagacattgaaatgcgtgcagcaccgggcggaaatgctgtcgatgcgggacaaggttccgatggagtgggtaatgcctcgggtgattggcattgcgattccacctggtctgagggcaaggtcacaacaacctcgaccagaacctgggtcttgcccacctacaacaaccacttgtacctgcggctcggaacaacatcaaacagcaacacctacaacggattctccaccccctggggatactttgactttaacagattccactgtcacttctcaccacgtgactggcaaagactcatcaacaacaactggggactacgaccaaaagccatgcgcgttaaaatcttcaatatccaagttaaggaggtcacaacgtcgaacggcgagactacggtcgctaataaccttaccagcacggttcagatatttgcggactcgtcgtatgagctcccgtacgtgatggacgctggacaagagggaagtctgcctcctttccccaatgacgtcttcatggtgcctcaatatggctactgtggcattgtgactggcgaaaatcagaaccagacggacagaaatgctttctactgcctggagtattttccttcacaaatgctgagaactggcaataactttgaaatggcttacaactttgagaaggtgccgttccactcaatgtatgctcacagccagagcctggacagactgatgaatcccctcctggaccagtacctgtggcacttacagtcgaccacctctggagagactctgaatcaaggcaatgcagcaaccacatttggaaaaatcaggagtggagactttgccttttacagaaagaactggctgcctgggccttgtgttaaacagcagagattctcaaaaactgccagtcaaaattacaagattcctgccagcgggggcaacgctctgttaaagtatgacacccactataccttaaacaaccgctggagcaacatagcgcctggacctccaatggcaacagctggaccttcagatggggacttcagcaacgcccagctcatcttccctggaccatcagtcaccggaaacacaacaacctcagcaaacaatctgttgtttacatcagaaggagaaattgctgccaccaacccaagagacacggacatgtttggtcagattgctgacaataatcagaatgctacaactgctcccataaccggcaacgtgactgctatgggagtgcttcctggcatggtgtggcaaaacagagacatttactaccaagggccaatttgggccaagatcccacacgcggacggacattttcatccttcaccgctaattggcggttttggactgaaacatccgcctccccagatatttatcaaaaacacccccgtacctgccaatcctgcgacaaccttcactgcagccagagtggactctttcatcacacaatacagcaccggccaggtcgctgttcagattgaatgggaaatcgaaaaggaacgctccaaacgccggaatcctgaagtgcagtttacttcaaactatgggaaccagtcttctatgttgtgggctcccgatacaactgggaagtatacagagccgcgggttattggctctcgttatttgactaatcatttgtaactgcctagttaatcaataaaccgtgtgattcgtttcagttgaactttggtctctgcgaagggcgaattc

SEQ ID NO: 425 - protein, 733 aa, Adeno-associated virus
MAADGYLPDWLEDNLSEGIREWWDLKPGAPKPKANQQKQDDGRGLVLPGYEYLGPFNGLDKGEPVNAADAAALEHDKAYDQQLKAGDNPYLRYNHADAEFQERLQEDTSFGGNLGRAVFQAKKRVLEPLGLVEEGAKTAPGKKRPLESPQEPDSSSGIGKKGKQPAKKRLNFEEDTGAGDGPPEGSDTSAMSSDIEMRAAPGGNAVDAGQGSDGVGNASGDWHCDSTWSEGKVTTTSTRTWVLPTYNNHLYLRLGTTSNSNTYNGFSTPWGYFDFNRFHCHFSPRDWQRLINNNWGLRPKAMRVKIFNIQVKEVTTSNGETTVANNLTSTVQIFADSSYELPYVMDAGQEGSLPPFPNDVFMVPQYGYCGIVTGENQNQTDRNAFYCLEYFPSQMLRTGNNFETAYNFEKVPFHSMYAHSQSLDGLMNPLLDQYLWHLQSTTSGETLNQGNAATTFGKIRSGDFAFYRKNWLPGPCVKQQRFSKTASQNYKIPASGGNALLKYDTHYTLNNRWSNIAPGPPMATAGPSDGDFSNAQLIFPGPSVTGNTTTSANNLLFTSEEEIAATNPRDTDMFGQIADNNQNATTAPITGNVTAMGVLPGMVWQNRDIYYQGPIWAKIPHADGHFHPSPLIGGFGLKHPPPQIFIKNTPVPAYPATTFTAARVDSFITQYSTGQVAVQIEWEIEKERSKRWNPEVQFTSNCGNQSSMLWAPDTTGKYTEPRVIGSRYLTNHL

SEQ ID NO: 426 - DNA, 3105 bp, Adeno-associated virus
gaattcgcccttcgcagagaccaaagttcaactgaaacgaatcacacggtttattgattaactaggcagttacaaatgattagtcaaataacgagagccaataacccgcggctctgtatacttcccagttgtatcgggagcccacaacatagaagactggttcccacagtttgaagtaaactgcacttcaggattccagcgtttggagcgttccttttcgatttcccattcaatctgaacagcgacctggccggtgctgtattgtgtgatgaaagagtccactctggctgcagtgaaggttgtcgcaggataggcaggtacgggggtgtttttgataaatatctggggaggcggatgtttcagtccaaaaccgccaattagcggtgaaggatgaaaatgtccgtccgcgtgtgggatcttggcccaaattggcccttggtagtaaatgtctctgttttgccacaccatgccaggaagcactcccatagcagtcacgttgccggttatgggagcagttgtagcattctgattattgtcagcaatctgaccaaacatgtccgtgtctcttgggttggtggcagcaatttcttcttctgatgtaaacaacagattgtttgctgaggttgttgtgtttccggtgactgatggtccagggaagatgagctgggcgttgctgaagtccccatctgaaggtccagctgttgccattggaggtccaggcgctatgttgctccagcggttgtttaaggtatagtgggtgtcatactttaacagagcgttgcccccgctggcaggaatcttgtaattttgactggcagtttttgagaatctctgctgtttaacacaaggcccaggcagccagttctttctgtaaaaggcaaagtctccactcctgatttttccaaatgtggttgctgcattgccttgattcagagtctctccagaggtggtcgactgtaagtgccacaggtactggtccaggaggggattcatcagtccgtccaggctctggctgtgagcatacattgagtggaacggcaccttctcaaagttgtaagccgtttcaaagttattgccagttctcagcatttgtgaaggaaaatactccaggcagtagaaagcatttctgtccgtctggttctgattttcgccagtcacaatgccacagtagccatattgaggcaccatgaagacgtcattggggaaaggaggcagacttccctcttgtccagcgtccatcacgtacgggagctcatacgacgagtccgcaaatatctgaaccgtgctggtaaggttattagcgaccgtagtctcgccgttcgacgttgtgacctccttaacttggatattgaagattttaacgcgcatggcttttggtcgtagtccccagttgttgttgatgagtctttgccagtcacgtggtgagaagtgacagtggaatctgttaaagtcaaagtatccccagggggtggagaatccgttgtaggtgttgctgtttgatgttgttccgagccgcaggtacaagtggttgttgtaggtgggcaagacccaggttctggtcgaggttgttgtgaccttgccctcagaccaggtggaatcgcaatgccaatcacccgaggcattacccactccatcggaaccttgtcccgcatcgacagcatttccgcccggtgctgcacgcatttcaatgtctgaagacatggcgctggtatctgatccttcagggggtccgtctccggctccagtgtcctcttcaaagttgagtctctttttggctggttgtttgccttttttgccgattcctgaggaggagtcgggctcttgtggtgactctaacggtctcttctttccaggagccgtcttagcaccttcttcaaccaggcccagaggttcgagtaccctcttcttggcctggaagactgctcgcccgaggttgcccccaaaagacgtatcttcttgcagacgctcctgaaactcggcgtcggcgtggttataccgcaggtacggattgtcacccgctttgagctgctggtcgtaggccttgtcgtgctcgagggccgctgcgtccgccgcgttgacgggctcccccttgtcgagtccgttgaagggtccgaggtactcgtagccaggaagcaccagaccccggccgtcgtcctgcttctgctggttggccttgggcttgggggctccaggtttcaggtcccaccactcgcgaatgccctcagagaggttgtcctcgagccaatctggaagataaccgtcagcagccatacctggtttaagtcatttattgctcagaaacacagtcatccaagtccacgttgacgagatcgcaggccgaacacgcaatctcgggtgcccgccccagcagatgatgaatcgcgcacagtttctgatacgtcttttttctgacgacgggttgagattctgacgcgccggggaagcactctgagcagtctctgaccccgtgcgtgaagcagacgttgaaattctgattcattctctcgcatgtcttgcagggaaacagcatctgaagcatgcccgcgtgacgagaacatttgttttggtacctgtccgcaaggtccaccggtgcttccgcgtctgacgtcgatggctccgcaactgaggggcaggcccgcttgggctcgcttatatccgcgtcactgggggcgggtcttttggtggctccgccctttctgacgtagaactcatgcgccacctcagtcacgtgatcctgagcccagcggaagaactctttgacttcctgcttggtcaccttgccaaagtcgtgctccagacggcgggtgagctcgaacttgaacatgcggtcctgcagcggctgctggtgctcgaaggtggtgctgttcccgtcgatcacggcgcacatgttggtgttggaggtgacgatcacgggcgtggggtcgatctgggccgatgacttgcacttttggtccacgcgcaccttgcttccgcccagaatggccttggcggactccacgaccttggcggtcatcttgccctcctcccaccagatcaccatcttgtcgacgcaatcgttgaagggaaagttctcattggtccagttgacgcagcaagggcgaattc

SEQ ID NO: 427 - protein, 729 aa, Adeno-associated virus
MAADGYLPDWLEDNLSEGIREWWDLKPGAPKPKANQQKQDDGRGLVLPGYKYLGPFNGLDKGEPVNAADAAALEHDKAYDQQLKAGDNPYLRYNHADAEFQERLQEDTSFGGNLGRAVFQAKKRVLEPLGLVEEGAKTAPGKKRPIDSPDSSTGIGKKGQQPAKKKLNFGQTGDSESVPDPQPLGEPPAAPSSVGSGTMAAGGGAPMADNNEGADGVGNASGNWHCDSTWLGDRVITTSTRTWALPTYNNHLYKQISSSSSGATNDNHYFGYSTPWGYFDFNRFHCHFSPRDWQRLINNNWGFRPKKLRFKLFNIQVKEVTTNDGVTTIANNLTSTVQVFSDSEYQLPYVLGSAHQGCLPPFPADVFMIPQYGYLTLNNGSQSVGRSSFYCLEYFPSQMLRTGNNFEFSYSFEDVPFHSSYAHSQSLDRLMNPLIDQYLYYLARTQSTTGSTRELQFHQAGPNTMAEQSKNWLPGPCYRQQGLSKNLDFNNNSNFAWTAATKYHLNGRNSLTNPGIPMATNKDDEDQFFPINGVLVFGKTGAANKTTLENVLMTSEEEIKTTNPVATEEYGVVSSNLQPSTAGPQSQTINSQGALPGMVWQNRDVYLQGPIWAKIPHTDGNFHPSPLMGGFGLKHPPPQILIKNTPVPANPPEVFTPAKFASFITQYSTGQVSVEIEWELQKENSKRWNPEIQYTSNYAKSNNVEFAVNPDGVYTEPRPIGTRYLPRNL

SEQ ID NO: 428 - DNA, 3094 bp, Adeno-associated virus
gaattcgcccttgctgcgtcaactggaccaagagaactttcccttcaacgattgcgtcgacaagatggtgatctggtgggaggagggcaagatgacggccaaggtcgtggagtccgccaaagccattctgggcggaagcaaggtgcgcgtcgaccaaaagtgcaagtcctcggcccagatcgatcccacccccgtgatcgtcacctccaacaccaacatgtgcgccgtgatcgacgggaacagcaccaccttcgagcaccagcagccgttgcaggaccggatgttcaaatttgaactcacccgccgtctggaacacgactttggcaaggtgaccaagcaggaagtcaaagagttcttccgctgggctagtgatcacgtgactgaggtgacgcatgagttctacgtcagaaagggcggagccagcaaaagacccgcccccgatgacgcggatataagcgagcccaagcgggcctgtccctcagtcacggacccatcgacgtcagacgcggaaggagctccggtggactttgccgacaggtaccaaaacaaatgttctcgtcacgcgggcatgcttcagatgctgtttccctgcaaaacgtgcgagagaatgaatcagaatttcaacatttgcttcacgcacggggtcagagactgtttagaatgtttccccggcgtgtcagaatctcaaccggtcgtcagaaaaaagacgtatcggaagctgtgtgcgattcatcatctgctggggcgggcacccgagattgcttgctcggcctgcgacctggtcaacgtggacctggacgactgtgtttctgagcaataaatgacttaaaccgggtatggctgccgatggttatcttccagattggctcgaggacaacctctctgagggcattcgcgagtggtgggacctgaaacctggagccccgaaacccaaagccaaccagcaaaagcaggacgacggccggggtctggtgcttcctggctacaagtacctcggacccttcaacggactcgacaagggggagcccgtcaacgcggcggacgcagcggccctcgagcacgacaaggcctacgaccagcagctcaaagcgggtgacaatccgtacctgcggtataaccacgccgacgccgagtttcaggagcgtctgcaagaagatacgtcatttgggggcaacctcgggcgagcagtcttccaggccaagaagcgggttctcgaacctctcggtctggttgaggaaggcgctaagacggctcctggaaagaagagacccatagactctccagactcctccacgggcatcggcaaaaaaggccagcagcccgctaaaaagaagctcaattttggtcagactggcgactcagagtcagtccccgaccctcaacctcttggagaacctccagcagcgccctctagtgtgggatctggtacaatggctgcaggcggtggcgcaccaatggcagacaataacgaaggtgccgacggagtgggtaatgcctcaggaaattggcattgcgattccacatggctgggcgacagagtcatcaccaccagcaccagaacctgggccctccccacctacaacaaccacctctacaagcaaatctccagcagcagctcaggagccaccaatgacaaccactacttcggctacagcaccccctgggggtattttgactttaacagattccactgccacttctcaccacgtgactggcagcgactcatcaacaacaactggggattccggcccaagaagctgcggttcaagctcttcaacatccaggtcaaggaggtcacaacgaatgacggcgtcacgaccatcgctaataaccttaccagcacggttcaggtcttctcggactcggaataccagctgccgtacgtcctcggctctgcgcaccagggctgcctgcctccgttcccggcggacgtcttcatgattcctcagtacggctacctgactctgaacaacggcagccaatcggtgggccgttcctccttctactgcctggaatatttcccctctcaaatgctgagaacgggcaacaactttgagttcagttacagcttcgaggacgtgcctttccacagcagctacgcgcacagccagagcctagaccggctgatgaaccctctcatcgaccagtacctgtactacctggcccggacccagagcaccacgggttccaccagggaactgcaatttcatcaagctgggcccaatactatggccgagcagtcaaagaactggctgcctggaccctgctataggcaacagggactgtcaaagaacttggactttaacaacaacagcaattttgcctggactgctgccactaaatatcatctgaatggcagaaactctttgaccaatcctggcattcccatggcaaccaacaaggatgatgaggaccagttctttcccatcaacggggtactggtttttggcaagacgggagctgccaacaaaactacgctggaaaacgttctgatgaccagcgaggaggagatcaagaccactaaccctgtggctacagaagaatacggtgtggtctccagcaacctgcagccgtctacagccgggcctcaatcacagactatcaacagccagggagcactgcctggcatggtctggcagaaccgggacgtgtatctgcagggtcccatctgggccaaaattcctcacacggatggcaactttcacccgtctcctctgatgggcggttttggactcaaacacccgcctccacagatcctgatcaaaaacacacctgtacctgctaatcctccggaggtgtttactcctgccaagtttgcctccttcatcacgcagtacagcaccggacaagtcagcgtggaaatcgagtgggagctgcagaaagaaaacagcaagcgctggaacccagaaattcagtatacttccaattatgccaagtctaataatgttgaatttgctgtgaaccctgatggtgtttatactgagcctcgccccattggcactcgttacctcccccgtaatctgtaattgcttgttaatcaataaaccggttgattcgtttcagttgaactttggtctctgcgaagggcgaattc

SEQ ID NO: 429 - protein, 1458 aa, Adeno-associated virus
MAADGYLPDWLEDNLSEGIREWWDLKPGAPKPKANQQKQDDGRGLVLPGYKYLGPFNGLDKGEPVNAADAAALEHDKAYDQQLKAGDNPYLRYNHADAEFQERLQEDTSFGGNLGRAVFQAKKRVLEPLGLVEEGAKTAPGKKRPIDSPDSSTGIGKKGQQPAKKKLNFGQTGDSESVPDPQPLGEPPAAPSSVGSGTMAAGGGAPTADNNEGADGVGNASGNWHCDSTWLGDRVITTSTRTWALPTYNNHLYKQISSSSSGATNDNHYFGYSTPWGYFDFNRFHCHFSPRDWQRLINNNWGFRPKKLRFKLFNIQVKEVTTNDGVTTIANNLTSTVQVFSDSEYQLPYVLGSAHQGCLPPFPADVFMIPQYGYLTLNNGSQSVGRSSFYCLEYFPSQMLRTGNNFEFSYSFEDVPFHSSYAHSQSLDRLMNPLIDQYLYYLARTQSTTGSTRELQFHQAGPNTMAEQSKNWLPGPCYRQQRLSKNLDFNNNSNFAWTAATKYHLNGRNSLTNPGIPMATNKDDEDQFFPINGVLVFGKTGAANKTTLENVLMTSEEEIKTTNPVATEEYGVVSSNLQSSTAGPQSQTINSQGALPGMVWQNRDVYLQGPIWAKIPHTDGNFHPSPLMGGFGLEHPPPQILIKNTPVPANPPEVFTPAKFASFITQYSTGQVSVEIEWELQKENSKRWNPEIQYTSNYAKSNNVEFAVNPDGVYTEPRPIGTRYLTRNLMAADGYLPDWLEDNLSEGIREWWDLKPGAPKPKANQQKQDDGRGLVLPGYKYLGPFNGLDKGEPVNAADAAALEHDKAYDQQLKAGDNPYLRYNHADAEFQERLQEDTSFGGNLGRAVFQAKKRVLEPLGLVEEGAKTAPGKKRPIGSPDSSTGIGKKGQQPAKKKLNFGQTGDSESVPDPQPLGEPPAAPSSVGSGTMAAGGGAPMADNNEGADGVGNASGNWHCDSTWLGDRVITTSTRTWALPTYNNHLYKQISSSSSGATNDNHYFGYSTPWGYFDFNRFHCHFSPRDWQRLINNNWGFRPKKLRFKLLNIQVKEVTTNDGVTTIANNLTSTVQVFSDSEYQLPYVLGSAHQGCLPPFPADVFMIPQYGYLTLDNGSQSVGRSSFYCLEYFPSQMLRTGNNFEFSYSFEDVPFHSSYAHSQSLDRLMNPLIDQYLYYLARTQSTTGSTRELQFHQAGPNTMAEQSKNWLPGPCYRQQRLSKNLDFNNNSNFAWTAATKYHLNGRNSLTNPGIPMATNKDDEDQFFPINGVLVFGKTGAANKTTLENVLMTSEEEIKTTNPVATEEYGVVSSNLQSSTAGPQSQTINSQGALPGMVWQNRDVYLQGPIWAKIPHTDGNFHPSPLMGGFGLKHPPPQILIKNTPVPANPPEVFTPAKFASFITQYSTGQVSVEIEWELQKENSKRWNPEIQYTSNYAKSNNVEFAVNPDGVYTEPRPIGTRYLTRNL

SEQ ID NO: 430 - DNA, 3095 bp, Adeno-associated virus
gaattcgcccttcgcagagaccaaagttcaactgaaacgaatcaaccggtttattgattaacaagcaattacagattacgggtgaggtaacgagtgccaatggggcgaggctcagtataaacaccatcagggttcacagcaaattcaacattattagacttggcataattggaagtatactgaatttctgggttccagcgcttgctgttttctttctgcagctcccactcgatttccacgctgacttgtccggtgctgtactgcgtgatgaaggaggcaaacttggcaggagtaaacacctccggaggattagcaggtacaggtgtgtttttgatcaggatctgtggaggcgggtgtttgagtccaaaaccgcccatcagaggagacgggtgaaagttgccatccgtgtgaggaattttggcccagatgggaccctgcagatacacgtcccggttctgccagaccatgccaggcagtgctccctggctgttgatagtctgtgattgaggcccggctgtagacgactgcaggttgctggagaccacaccgtattcttctgtagccacagggttagtggtcttgatctcctcctcgctggtcatcagaacgttttccagcgtagttttgttggcagctcccgtcttgccaaaaaccagtaccccgttgatgggaaagaactggtcctcatcatccttgttggttgccatgggaatgccaggattggtcaaagagtttctgccattcagatgatatttagtggcagcagtccaggcaaaattgctgttgttgttaaagtccaagttctttgacagtctctgttgcctatagcagggtccaggcagccagttctttgactgctcggccatagtattgggcccagcttgatgaaattgcagttccctggtggaacccgtggtgctctgggtccgggccaggtagtacaggtactggtcgatgagagggttcatcagccggtctaggctctggctgtgcgcgtagctgctgtggaaaggcacgtcctcgaagctgtaactgaactcaaagttgttgcccgttctcagcatttgagaggggaaatattccaggcagtagaaggaggaacggcccaccgattggctgccgttgtccagagtcaggtagccgtactgaggaatcatgaagacgtccgccgggaacggaggcaggcagccctggtgcgcagagccgaggacgtacggcagctggtattccgagtccgagaagacctgaaccgtgctggtaaggttattagcgatggtcgtgacgccgtcattcgttgtgacctccttgacctggatgttgaggagcttgaaccgcagcttcttgggccggaatccccagttgttgttgatgagtcgctgccagtcacgtggtgagaagtggcagtggaatctgttaaagtcaaaatacccccagggggtgctgtagccgaagtagtggttgtcattggtggctcctgagctgctgctggagatttgcttgtagaggtggttgttgtaggtggggagggcccaggttctggtgctggtggtgatgactctgtcgcccagccatgtggaatcgcaatgccaatttcctgaggcattacccactccgtcggcaccttcgttattgtctgccattggtgcgccaccgcctgcagccattgtaccagatcccacactagagggcgctgctggaggttctccaagaggttgagggtcggggactgactctgagtcgccagtctgaccaaaattgagcttctttttagcgggctgctggccttttttgccgatgcccgtggaggagtctggagagcctatgggtctcttctttccaggagccgtcttagcgccttcctcaaccagaccgagaggttcgagaacccgcttcttggcctggaagactgctcgcccgaggttgcccccaaatgacgtatcttcttgcagacgctcctgaaactcggcgtcggcgtggttataccgcaggtacggattgtcacccgctttgagctgctggtcgtaggccttgtcgtgctcgagggccgctgcgtccgccgcgttgacgggctcccccttgtcgagtccgttgaagggtccgaggtacttgtagccaggaagcaccagaccccggccgtcgtcctgcttttgctggttggctttgggtttcggggctccaggtttcaggtcccaccactcgcgaatgccctcagagaggttgtcctcgagccaatctggaagataaccatcggcagccatacctggtttaagtcatttattgctcagaaacacagtcgtccaggtccacgttgaccaggtcgcaggccgagcaagcaatctcgggtgcccgccccagcagatgatgaatcgcacacagcttccgatacgtcttttttctgacgaccggttgagattctgacacgccggggaaacattctaaacagtctctgaccccgtgcgtgaagcaaatgttgaaattctgattcattctctcgcacgttttgcagggaaacagcacctgaagcatgcccgcgtgacgagaacatttgttttggtacctgtcggcaaagtccaccggagctccttccgcgtctgacgtcgatgggtccgtgactgagggacgggcccgcttgggctcgcttatatccgcgtcatcgggggcgggtcttttgctggctccgccctttctgacgtagaactcatgcgtcacctcagtcacgtgatcactagcccagcggaagaactctttgacttcctgctttgtcaccttgccaaagtcgtgttccagacggcgggtgagttcaaatttgaacatccggtcctgcaacggttgctggtgctcgaaggtggtgctgttcccgtcgatcacggcgcacatgttggtgttggaggtgacgatcacgggggtgggatcgatctgggcggacgacttgcacttttggtccacgcgcaccttgctgccgccgagaatggccttggcggactccacgaccttggccgtcatcttgccctcctcccaccagatcaccatcttgtcgacgcaatcgttgaagggaaagttctcattggtccagttgacgcagcaagggcgaattc

SEQ ID NO: 431 - DNA, 3095 bp, Adeno-associated virus
gaattcgcccttcgcagagaccaaagttcaactgaaacgaatcaaccggtttattgattaacaagcaattacagattacgggtgaggtaacgagtgccaatggggcgaggctcagtataaacaccatcagggttcacagcaaattcaacattattagacttggcataattggaagtatactgaatttctgggttccagcgcttgctgttttctttctgcagctcccactcgatttccacgctgacttgtccggtgctgtactgcgtgatgaaggaggcaaacttggcaggagtaaacacctccggaggattagcaggtacaggtgtgtttttgatcaggatctgtggaggcgggtgttcgagtccaaaaccgcccatcagaggagacgggtgaaagttgccatccgtgtgaggaattttggcccagatgggaccctgcagatacacgtcccggttctgccagaccatgccaggcagtgctccctggctgttgatagtctgtgattgaggcccggctgtagacgactgcaggttgctggagaccacaccgtattcttctgtagccacagggttagtggtcttgatctcctcctcgctggtcatcagaacgttttccagcgtagttttgttggcagctcccgtcttgccaaaaaccagtaccccgttgatgggaaagaactggtcctcatcatccttgttggttgccatgggaatgccaggattggtcaaagagtttctgccattcagatgatatttagtggcagcagtccaggcaaaattgctgttgttgttaaagtccaagttctttgacagtctctgttgcctatagcagggtccaggcagccagttctttgactgctcggccatagtattgggcccagcttgatgaaattgcagttccctggtggaacccgtggtgctctgggtccgggccaggtagtacaggtactggtcgatgagagggttcatcagccggtctaggctctggctgtgcgcgtagctgctgtggaaaggcacgtcctcgaagctgtaactgaactcaaagttgttgcccgttctcagcatttgagaggggaaatattccaggcagtagaaggaggaacggcccaccgattggctgccgttgttcagagtcaggtagccgtactgaggaatcatgaagacgtccgccgggaacggaggcaggcagccctggtgcgcagagccgaggacgtacggcagctggtattccgagtccgagaagacctgaaccgtgctggtaaggttattagcgatggtcgtgacgccgtcattcgttgtgacctccttgacctggatgttgaagagcttgaaccgcagcttcttgggccggaatccccagttgttgttgatgagtcgctgccagtcacgtggtgagaagtggcagtggaatctgttaaagtcaaaatacccccagggggtgctgtagccgaagtagtggttgtcattggtggctcctgagctgctgctggagatttgcttgtagaggtggttgttgtaggtggggagggcccaggttctggtgctggtggtgatgactctgtcgcccagccatgtggaatcgcaatgccaatttcctgaggcattacccactccgtcggcaccttcgttattgtctgccgttggtgcgccaccgcctgcagccattgtaccagatcccacactagagggcgctgctggaggttctccaagaggttgagggtcggggactgactctgagtcgccagtctgaccaaaattgagcttctttttagcgggctgctggccttttttgccgatgcccgtggaggagtctggagagtctatgggtctcttctttccaggagccgtcttagcgccttcctcaaccagaccgagaggttcgagaacccgcttcttggcctggaagactgctcgcccgaggttgcccccaaatgacgtatcttcttgcaggcgctcctgaaactcggcgtcggcgtggttataccgcaggtacggattgtcacccgctttgagctgctggtcgtaggccttgtcgtgctcgagggccgctgcgtccgccgcgttgacgggctcccccttgtcgagtccgttgaagggtccgaggtacttgtagccaggaagcaccagaccccggccgtcgtcctgcttttgctggttggctttgggtttcggggctccaggtttcaggtcccaccactcgcgaatgccctcagagaggttgtcctcgagccaatctggaagataaccatcggcagccatacctggtttaagccatttattgctcagaaacacagtcgtccaggtccacgttgaccaggtcgcaggccgagcaggcaatctcgggtgcccgccccagcagatgatgaatcgcacacagcttccgatacgtcttttttctgacgaccggttgagattctgacacgccggggaaacattctaaacagtctctgaccccgtgcgtgaagcaaatgttgaaattctgattcattctctcgcacgttttgcagggaaacagcatctgaagcatgcccgcgtggcgagaacatttgttttggtacctgtcggcaaagtccaccggagctccttccgcgtctgacgtcgatgggtccgtgactgagggacaggcccgcttgggctcgcttatatccgcgtcatcgggggcgggtcttttgctggctccgccctttctgacgtagaactcatgcgtcacctcagtcacgtgatcactagcccagcggaagaactctttgacttcctgctttgtcaccttgccaaagtcgtgttccagacggcgggtgagttcaaatttgaacatccggtcctgcaacggctgctggtgctcgaaggtggtgctgttcccgtcgatcacggcgcgcatgttggtgttggaggtgacgatcacgggggtgggatcgatctgggcggacgacttgcacttttggtccacgcgcaccttgctgccgccgagaatggccttggcggactccacgaccttggccgtcatcttgccctcctcccaccagatcaccatcttgtcgacgcaatcgttgaagggaaagttctcattggtccagttgacgcagcaagggcgaattc

SEQ ID NO: 432 - protein, 729 aa, Adeno-associated virus; identical to SEQ ID NO: 160

SEQ ID NO: 433 - protein, 729 aa, Adeno-associated virus
MAADGYLPDWLEDNLSEGIREWWDLKPGAPKPKANQQKQDDGRGLVLPGYKYLGPFNGLDKGEPVNAADAAALEHDKAYDQQLKAGDNPYLRYNHADAEFQERLQEDTSFGGNLGRAVFQAKKRVLEPLGLVEEGAKTAPGKKRPIDSPDSSTGIGKKGQQPAKKKLNFGQTGDSESVPDPQPLGEPPAAPSSVGSGTMAAGGGAPTADNNEGADGVGNASGNWHCDSTWLGDRVITTSTRTWALPTYNNHLYKQISSSSSGATNDNHYFGYSTPWGYFDFNRFHCHFSPRDWQRLINNNWGFRPKKLRFKLFNIQVKEVTTNDGVTTIANNLTSTVQVFSDSEYQLPYVLGSAHQGCLPPFPADVFMIPQYGYLTLNNGSQSVGRSSFYCLEYFPSQMLRTGNNFEFSYSFEDVPFHSSYAHSQSLDRLMNPLIDQYLYYLARTQSTTGSTRELQFHQAGPNTMAEQSKNWLPGPCYRQQRLSKNLDFNNNSNFAWTAATKYHLNGRNSLTNPGIPMATNKDDEDQFFPINGVLVFGKTGAANKTTLENVLMTSEEEIKTTNPVATEEYGVVSSNLQSSTAGPQSQTINSQGALPGMVWQNRDVYLQGPIWAKIPHTDGNFHPSPLMGGFGLKHPPPQILIKNTPVPANPPEVFTPAKFASFITQYSTGQVSVEIEWELQKENSKRWNPEIQYTSNYAKSNNVEFAVNPDGVYTEPRPIGTRYLTRNL

SEQ ID NO: 434 - protein, 729 aa, Adeno-associated virus
MAADGYLPDWLEDNLSEGIREWWDLKPGAPKPKANQQKQDDGRGLVLPGYKYLGPFNGLDKGEPVNAADAAALEHDKAYDQQLKAGDNPYLRYNHADAEFQERLQEDTSFGGNLGRAVFQAKKRVLEPLGLVEEGAKTAPGKKRPIDSPDSSTGIGKKGQQPAKKKLNFGQTGDSESVPDPQPLGEPPAAPSSVGSGTMAAGGGAPMADNNEGADGVGNASGNWHCDSTWLGDRVITTSTRTWALPTYNNHLYKQISSSSSGATNDNHYFGYSTPWGYFDFNRFHCHFSPRDWQRLINNNWGFRPKKLRFKLFNIQVKEVTTNDGVTTIANNLTSTVQVFSDSEYQLPYVLGSAHQGCLPPFPADVFMIPQYGYLTLNNGSQSVGRSSFYCLEYFPSQMLRTGNNFEFSYSFEDVPFHSSYAHSQSLDRLMNPLIDQYLYYLARTQSTTGSTRELQFHQAGPNTMAEQSKNWLPGPCYRQQRLSKNLDFNNNSNFAWTAATKYHLNGRNSLTNPGIPMATNKDDEDQFFPINGVLVFGKTGAANKTTLENVLMTSEEEIKTTNPVATEEYGVVSSNLQSSTAGPQSQTINSQGALPGMVWQNRDVYLQGPIWAKIPHTDGNFHPSPLMGGFGLKHPPPQILIKNTPVPANPPEVFTPAKFASFITQYSTGQVSVEIEWELQKENSKRWNPEIQYTSNYAKSNNVEFAVNPDGVYTEPRPIGTRYLTRNL

SEQ ID NO: 435 - DNA, 2217 bp, Adeno-associated virus
atggctgctgacggttatcttccagattggctcgaggacaacctctctgagggcattcgcgagtggtgggacctgaaacctggagcccccaagcccaaggccaaccagcagaagcaggacgacggccggggtctggtgcttcctggctacaagtacctcggacccttcaacggactcgacaagggggagcccgtcaacgcggcggacgcagcggccctcgagcacgacaaggcctacgaccagcagctcaaagcgggtgacaatccgtacctgcggtataaccacgccgacgccgagtttcaggagcgtctacaagaagatacgtcttttgggggcaacctcgggcgagcagtcttccaggccaagaagcgggttctcgaacctctcggtctggttgaggaagctgctaagacggctcctggaaagaagagaccggtagaaccgtcacctcagcgttcccccgactcctccacgggcatcggcaagaaaggccagcggcccgctaaaaagagactgaactttggtcagactggcgactcagagtcagtccccgaccctcaaccaatcggagaaccaccagcaggcccctctggtctgggatctggtacaatggctgcaggcggtggcgctccaatggcagacaataacgaaggcgccgacggagtgggtagttcctcaggaaattggcattgcgattccacatggctgggcgacagagtcatcaccaccagcacccgaacctgggccctgcccacctacaacaaccacctctacaagcaaatatccaatgggacatcgggaggaagcaccaacgacaacacctacttcggctacagcaccccctgggggtattttgacttcaacagattccactgccacttctcaccacgtgactggcagcgactcatcaacaacaactggggattccggccaaaaagactcagcttcaagcccttcaacatccaggtcaaggaggtcacgcagaatgaaggcaccaagaccatcgccaataaccttaccagcacgattcaggtatttacggactcggaataccagctgccgtacgtcctcggctccgcgcaccagggctgcctgcctccgttcccggcggacgtcttcatgattccccagtacggctaccttacactgaacaatggaagtcaagccgtaggccgttcctccttctactgcctggaatattttccatctcaaatgctgcgaactggaaacaattttgaattcagctacaccttcgaggacgtgcctttccacagcagctacgcacacagccagagcttggaccgactgatgaatcctctcatcgaccagtacctgcactacttatccagaactcagtccacaggaggaactcaaggtacccagcaattgttattttctcaagctgggcctgcaaacatgtcggctcaggctaagaactggctacctggaccttgctaccggcagcagcgagtctctacgacactgtcgcaaaacaacaacagcaactttgcttggactggtgccaccaaatatcacctgaacggaagagactctttggtaaatcccggtgtcgccatggcaacccacaaggacgacgaggaacgcttcttcccgtcgagtggagtcctgatgtttggaaaacagggtgctggaagagacaatgtggactacagcagcgttatgctaaccagcgaagaagaaattaaaaccactaaccctgtagccacagaacaatacggtgtggtggctgacaacttgcagcaaaccaatacagggcctattgtgggaaatgtcaacagccaaggagccttacctggcatggtctggcagaaccgagacgtgtacctgcagggtcccatctgggccaagattcctcacacggacggcaacttccacccttcaccgctaatgggaggatttggactgaagcacccacctcctcagatcctgatcaagaacacgccggtacctgcggatcctccaacaacgttcagccaggcgaaattggcttccttcattacgcagtacagcaccggacaggtcagcgtggaaatcgagtgggagctgcagaaggagaacagcaaacgctggaacccagagattcagtacacttcaaactactacaaatctacaaatgtggactttgctgtcaatacagagggaacttattctgagcctcgccccattggtactcgctacctcacccgtaatctgtaa

SEQ ID NO: 436 - protein, 738 aa, Adeno-associated virus
MAADGYLPDWLEDNLSEGIREWWDLKPGAPKPKANQQKQDDGRGLVLPGYKYLGPFNGLDKGEPVNAADAAALEHDKAYDQQLKAGDNPYLRYNHADAEFQERLQEDTSFGGNLGRAVFQAKKRVLEPLGLVEEAAKTAPGKKRPVEPSPQRSPDSSTGIGKKGQRPAKKRLNFGQTGDSESVPDPQPIGEPPAGPSGLGSGTMAAGGGAPMADNNEGADGVGSSSGNWHCDSTWLGDRVITTSTRTWALPTYNNHLYKQISNGTSGGSTNDNTYFGYSTPWGYFDFNRFHCHFSPRDWQRLINNNWGFRPKRLSFKPFNIQVKEVTQNEGTKTIANNLTSTIQVFTDSEYQLPYVLGSAHQGCLPPFPADVFMIPQYGYLTLNNGSQAVGRSSFYCLEYFPSQMLRTGNNFEFSYTFEDVPFHSSYAHSQSLDRLMNPLIDQYLHYLSRTQSTGGTQGTQQLLFSQAGPANMSAQAKNWLPGPCYRQQRVSTTLSQNNNSNFAWTGATKYHLNGRDSLVNPGVAMATHKDDEERFFPSSGVLMFGKQGAGRDNVDYSSVMLTSEEEIKTTNPVATEQYGVVADNLQQTNTGPIVGNVNSQGALPGMVWQNRDVYLQGPIWAKIPHTDGNFHPSPLMGGFGLKHPPPQILIKNTPVPADPPTTFSQAKLASFITQYSTGQVSVEIEWELQKENSKRWNPEIQYTSNYYKSTNVDFAVNTEGTYSEPRPIGTRYLTRNL

SEQ ID NO: 437 - DNA, 2217 bp, Adeno-associated virus
atggctgctgacggttatcttccagattggctcgaggacaacctctctgagggcattcgcgagtggtgggacctgaaacctggagcccccaagcccaaggccaaccagcagaagcaggacgacggccggggtctggtgcttcctggctacaagtacctcggacccttcaacggactcgacaagggggagcccgtcaacgcggcggacgcagcggccctcgagcacgacaaggcctacgaccagcagctcaaagcgggtgacaatccgtacctgcggtataaccacgccgacgccgagtttcaggagcgtctgcaagaagatacgtcttttgggggcaacctcgggcgagcagtcttccaggccaagaagcgggttctcgaacctctcggtctggttgaggaagctgctaagacggctcctggaaagaagagaccggtagaaccgtcacctcagcgttcccccgactcctccacgggcatcggcaagaaaggccagcagcccgctaaaaagagactgaactttggtcagactggcgactcagagtcagtccccgaccctcaaccaatcggagaaccaccagcaggcccctctggtctgggatctggtacaatggctgcaggcggtggcgctccaatggcagacaataacgaaggcgccgacggagtgggtagttcctcaggaaattggcattgcgattccacatggctgggcgacagagtcatcaccaccagcacccgaacctgggccctgcccacctacaacaaccacctctacaagcaaatatccaatgggacatcgggaggaagcaccaacgacaacacctacttcggctacagcaccccctgggggtattttgacttcaacagattccactgccacttctcaccacgtgactggcagcgactcatcaacaacaactggggattccggccaaaaagactcagcttcaagctcttcaacatccaggtcaaggaggtcacgcagaatgaaggcaccaagaccatcgccaataaccttaccagcacgattcaggtatttacggactcggaataccagctgccgtacgtcctcggctccgcgcaccagggctgcctgcctccgttcccggcggacgtcttcatgattccccagtacggctaccttacactgaacaatggaagtcaagccgtaggccgttcctccttctactgcctggaatattttccatctcaaatgctgcgaactggaaacaattttgaattcagctacaccttcgaggacgtgcctttccacagcagctacgcacacagccagagcttggaccgactgatgaatcctctcatcgaccagtacctgtactacttatccagaactcagtccacaggaggaactcaaggtacccagcaattgttattttctcaagctgggcctgcaaacatgtcggctcaggctaagaactggctacctggaccttgctaccggcagcagcgagtctctacgacactgtcgcaaaacaacaacagcaactttgcttggactggtgccaccaaatatcacctgaacggaagagactctttggtaaatcccggtgtcgccatggcaacccacaaggacgacgaggaacgcttcttcccgtcgagtggagtcctgatgtttggaaaacagggtgctggaagagacaatgtggactacagcagcgttatgctaaccagcgaagaagaaattaaaaccactaaccctgtagccacagaacaatacggtgtggtggctgataacttgcagcaaaccaatacggggcctattgtgggaaatgtcaacagccaaggagccttacctggcatggtctggcagaaccgagacgtgtacctgcagggtcccatctgggccaagattcctcacacggacggcaacttccacccttcaccgctaatgggaggatttggactgaagcacccacctcctcagatcctgatcaagaacacgccggtacctgcggatcctccaacaacgttcagccaggcgaaattggcttccttcattacgcagtacagcaccggacaggtcagcgtggaaatcgagtgggagctgcagaaggagaacagcaaacgctggaacccagagattcagtacacttcaaactactacaaatctacaaatgtggactttgctgtcaatacagagggaacttattctgagcctcgccccattggtactcgttacctcacccgtaatctgtaa

SEQ ID NO: 438 - protein, 738 aa, Adeno-associated virus; identical to SEQ ID NO: 90

SEQ ID NO: 439 - protein, 738 aa, Adeno-associated virus
MAADGYLPDWLEDNLSEGIREWWDLKPGAPKPKANQQKQDDGRGLVLPGYKYLGPFNGLDKGEPVNAADAAALEHDKAYDQQLKAGDNPYLRYNHADAEFQERLQEDTSFGGNLGRAVFQAKKRVLEPLGLVEEAAKTAPGKKRPVEPSPQRSPDSSTGIGKKGQQPAKKRLNFGQTGDSESVPDPQPIGEPPAGPSGLGSGTMAAGGGAPMADNNEGADGVGSSSGNWHCDSTWLGDRVITTSTRTWALPTYNNHLYKQISNGTSGGSTNDNTYFGYSTPWGYFDFNRFHCHFSPRDWQRLINNNWGFRPKRLSFKLFNIQVKEVTQDEGTKTIANNLTSTIQVFTDSEYQLPYVLGSAHQGCLPPFPADVFMIPQYGYLTLNNGSQAVGRSSFYCLEYFPSQMLRTGNNFEFSYTFEDVPFHSSYAHSQSLDRLMNPLIDQYLYYLSRTQSTGGTQGTQQLLFSQAGPANMSARAKNWLPGPCYRQQRVSTTLSQNNNSNFAWTGATKYHLNGRDSLVNPGVAMATHKDDEERFFPSSGVLMFGKQGAGRDNVDYSSVMLTSEEEIKTTNPVATEQYGVVADNLQQANTGPIVGNVNSQGALPGMVWQNRDVYLQGPIWAKIPHTDGNFHPSPLMGGFGLKHPPPQILIKNTPVPADPPTTFSQAKLASFITQYSTGQVSVEIEWELQKENSKRWNPEIQYTSNYYKSTNVDFAVNSEGTYSEPRPIGTRYLTRNL

SEQ ID NO: 440 - DNA, 2217 bp, Adeno-associated virus
atggctgctgacggttatcttccagattggctcgaggacaacctctctgagggcattcgcgagtggtgggacctgaaacctggagcccccaagcccaaggccaaccagcagaagcaggacgacggccggggtctggtgcttcctggctacaagtacctcggacccttcaacggactcgacaagggggagcccgtcaacgcggcggacgcagcggccctcgagcacgacaaggcctacgaccagcagctcaaagcgggtgacaatccgtacctgcggtataaccacgccgacgccgagtttcaggagcgtctgcaagaagatacgtcttttgggggcaacctcgggcgagcagtcttccaggccaagaagcgggttctcgaacctctcggtctggttgaggaagctgctaagacggctcctggaaagaagagaccggtagaaccgtcacctcagcgttcccccgactcctccacgggcatcggcaagaaaggccagcagcccgctaaaaagagactgaactttggtcagactggcgactcagagtcagtccccgaccctcaaccaatcggagaaccaccagcaggcccctctggtctgggatctggtacaatggctgcaggcggtggcgctccaatggcagacaataacgaaggcgccgacggagtgggtagttcctcaggaaattggcattgcgattccacatggctgggcgacagagtcatcaccaccagcacccgaacctgggccctgcccacctacaacaaccacctctacaagcaaatatccaatgggacatcgggaggaagcaccaacgacaacacctacttcggctacagcaccccctgggggtattttgacttcaacagattccactgccacttctcaccacgtgactggcagcgactcatcaacaacaactggggattccggccaaaaagactcagcttcaagctcttcaacatccaggtcaaggaggtcacgcaggatgaaggcaccaagaccatcgccaataaccttaccagcacgattcaggtatttacggactcggaataccagctgccgtacgtcctcggctccgcgcaccagggctgcctgcctccgttcccggcggacgtcttcatgattccccagtacggctaccttacactgaacaatggaagtcaagccgtaggccgttcctccttctactgcctggaatattttccatctcaaatgctgcgaactggaaacaattttgaattcagctacaccttcgaggacgtgcctttccacagcagctacgcacacagccagagcttggaccgactgatgaatcctctcatcgaccagtacctgtactacttatccagaactcagtccacaggaggaactcaaggtacccagcaattgttattttctcaagctgggcctgcaaacatgtcggctcgggctaagaactggctacctggaccttgctaccggcagcagcgagtctctacgacactgtcgcaaaacaacaacagcaactttgcttggactggtgccaccaaatatcacctgaacggaagagactctttggtaaatcccggtgttgctatggcaacgcataaggacgacgaggaacgtttctttccatcgagcggagtcctgatgtttggaaaacagggtgctggaagagacaatgtggactatagcagcgttatgctaaccagcgaggaagaaattaaaaccactaaccctgtagccacagaacaatacggtgtggtggctgacaacttgcagcaagccaatacagggcctattgtgggaaatgtcaacagccaaggagccttacctggcatggtctggcagaaccgagacgtgtacctgcagggtcccatctgggccaaaattcctcacacggacggcaattttcacccgtctcctctgatgggcggctttggactgaagcacccacctccccagatcctgatcaagaatacgccggtacctgcggatcctccaacgacgttcagccaggcaaaattggcttccttcatcacgcagtacagcaccggccaggtcagcgtggagatcgagtgggagctgcagaaggagaacagcaagcgatggaacccagaaattcagtacacttccaactactacaaatctacaaatgtggactttgctgtcaattctgagggtacatattcagagcctcgccccattggtactcgttatctgacacgtaatctgtaa

SEQ ID NO: 441 - DNA, 2211 bp, Adeno-associated virus
atggctgccgatggttatcttccagattggctcgaggacaacctctctgagggcattcgcgagtggtgggacttgaaacctggagccccgaaacccaaagccaaccagcaaaagcaggacgacggccggggcctggtgcttcctggctacaagtacctcggacccttcaacggactcgacaagggggagcccgtcaacgcggcggacgcagcggccctcgagcacgacaaggcctacgaccagcagctcgaagcgggtgacaatccgtacctgcggtataaccacgccgacgccgagtttcaggagcgtctgcaagaagatacgtcttttgggggcaacctcgggcgagcagtcttccaggccaagaagcgggttctcgaacctctcggtctggttgaggaaggcgctaagacggctcctggaaagaagagaccagtagagcagtcaccccaagaaccagactcctcctcgggcatcggcaagaaaggccaacagcccgccagaaaaagactcaattttggccagactggcgactcagagtcagttccagaccctcaacctctcggagaacctccagcagcgccctctggtgtgggacctaatacaatggctgcaggcggtggcgcaccaatggcagacaataacgaaggcgccgacggagtgggtagttcctcgggaaattggcattgcgattccacatggctgggcgacagagtcatcaccaccagcacccgaacctgggccctgcccacctacaacaaccacctctacaagcaaatctccaacgggacatcgggaggagccaccaacgacaacacctacttcggctacagcaccccctgggggtattttgactttaacagattccactgccacttttcaccacgtgactggcagcgactcatcaacaacaactggggattccggcccaagagactcagcttcaagctcttcaacatccaggtcaaggaggtcacgcagaatgaaggcaccaagaccatcgccaataacctcaccagcaccatccaggtgtttacggactcggagtaccagctgccgtacgttctcggctctgcccaccagggctgcctgcctccgttcccggcggacgtgttcatgattccccagtacggctacctaacactcaacaacggtagtcaggccgtgggacgctcctccttctactgcctggaatactttccttcgcagatgctgagaaccggcaacaacttccagtttacttacaccttcgaggacgtgcctttccacagcagctacgcccacagccagagcttggaccggctgatgaatcctctgattgaccagtacctgtactacttgtctcggactcaaacaacaggaggcacggcaaatacgcagactctgggcttcagccaaggtgggcctaatacaatggccaatcaggcaaagaactggctgccaggaccctgttaccgccaacaacgcgtctcaacgacaaccgggcaaaacaacaatagcaactttgcctggactgctgggaccaaataccatctgaatggaagaaattcattggctaatcctggcatcgctatggcaacacacaaagacgacgaggagcgttttttcccagtaacgggatcctgtttttggcaacaaaatgctgccagagacaatgcggattacagcgatgtcatgctcaccagcgaggaagaaatcaaaaccactaaccctgtggctacagaggaatacggtatcgtggcagataacttgcagcagcaaaacacggctcctcaaattggaactgtcaacagccagggggccttacccggtatggtctggcagaaccgggacgtgtacctgcagggtcccatctgggccaagattcctcacacggacggcaacttccacccgtctccgctgatgggcggctttggcctgaaacatcctccgcctcagatcctgatcaagaacacgcctgtacctgcggatcctccgaccaccttcaaccagtcaaagctgaactctttcatcacgcaatacagcaccggacaggtcagcgtggaaattgaatgggagctacagaaggaaaacagcaagcgctggaaccccgagatccagtacacctccaactactacaaatctacaagtgtggactttgctgttaatacagaaggcgtgtactctgaaccccgccccattggcacccgttacctcacccgtaatctgtaa

SEQ ID NO: 442 - protein, 736 aa, Adeno-associated virus
MAADGYLPDWLEDNLSEGIREWWDLKPGAPKPKANQQKQDDGRGLVLPGYKYLGPFNGLDKGEPVNAADAAALEHDKAYDQQLEAGDNPYLRYNHADAEFQERLQEDTSFGGNLGRAVFQAKKRVLEPLGLVEEGAKTAPGKKRPVEQSPQEPDSSSGIGKKGQQPARKRLNFGQTGDSESVPDPQPLGEPPAAPSGVGPNTMAAGGGAPMADNNEGADGVGSSSGNWHCDSTWLGDRVITTSTRTWALPTYNNHLYKQISNGTSGGATNDNTYFGYSTPWGYFDFNRFHCHFSPRDWQRLINNNWGFRPKRLSFKLFNIQVKEVTQNEGTKTIANNLTSTIQVFTDSEYQLPYVLGSAHQGCLPPFPADVFMIPQYGYLTLNNGSQAVGRSSFYCLEYFPSQMLRTGNNFQFTYTFEDVPFHSSYAHSQSLDRLMNPLIDQYLYYLSRTQTTGGTANTQTLGFSQGGPNTMANQAKNWLPGPCYRQQRVSTTTGQNNNSNFAWTAGTKYHLNGRNSLANPGIAMATHKDDEERFFPVTGSCFWQQNAARDNADYSDVMLTSEEEIKTTNPVATEEYGIVADNLQQQNTAPQIGTVNSQGALPGMVWQNRDVYLQGPIWAKIPHTDGNFHPSPLMGGFGLKHPPPQILIKNTPVPADPPTTFNQSKLNSFITQYSTGQVSVEIEWELQKENSKRWNPEIQYTSNYYKSTSVDFAVNTEGVYSEPRPIGTRYLTRNL

SEQ ID NO: 443 - DNA, 2214 bp, Adeno-associated virus
atggctgctgacggttatcttccagattggctcgaggacaacctctctgagggcattcgcgagtggtgggacctgaaacctggagcccccaagcccaaggccaaccagcagaagcaggacgacggccggggtctggtgcttcctggctacaagtacctcggacccttcaacggactcgacaagggggagcccgtcagcgcggcggacgcagcggccctcgagcacgacaaggcctgcgaccagcggctcaaagcgggtgacaatccgtacctgcggtataaccacgccgacgccgagtttcaggagcgtctgcaagaagatacgtcttttgggggcaacctcgggcgagcagtcttccaggccaagaagcgggttctcgaacctctcggtctggttgaggaagctgctaagacggctcctggaaagaagggaccggtagaaccgtcacctcagcgttcccccgactcctccacgggcatcggcaagaaaggccagcagcccgctagaaagagactgaactttgggcagactggcgactcagagtcagtccccgaccctcaaccaatcggagaaccaccagcaggcccctctggtctgggatctggtacaatggctgcaggcggtggcgcaccaatggctgacaataacgagggcgccgacggagtgggtaatgcctcaggaaattggcattgcgattccacatggctgggcgacagagtcatcaccaccagcacccgaacctgggctttgcccacctacaacaatcacctctacaagcaaatctccagtcagtcagcaggtagcaccaacgacaacgtctacttcggctacagcaccccctgggggtattttgacttcaacagattccactgtcacttctcaccacgtgactggcagcggctcatcaacaacaactggggattccggcccaagaagctcaacttcaagctgttcaacatccaggtcaaggaggtcacaacgaatgacggcgtcacgaccatcgccaataaccttaccagcacggttcaggtcttttcggactcggaataccagctgccctacgtcctcggctccgcacaccagggctgcctgcctccgttcccggcggacgtcttcatgattccccagtacggctacctgactctgaacaatggcagccaatcggtgggtcgttcctctttctactgcctggaatatttcccttctcaaatgctgagaacgggcaacaacttcaccttcagctacaccttcgaggacgttcccttccacagcagctacgcacacagccagagcctggaccggctgatgaatcctcttatcgaccagtacctgtattacctggccagaacacagagcaacgcaggaggcacagctggcaatcgggaactgcagttttatcagggcgggcctaccaccatggccgaacaagccaaaaactggctgcctggaccttgcttccggcaacaaagagtctccaagacgctggatcaaaacaacaacagcaactttgcttggactggtgccaccaaataccatctaaatggaagaaattcattggttaatcccggtgtcgccatggcaacccacaaggacgacgaggaacgcttcttcccttcgagcggagtcctgatttttggaaaaactggagcagctaataagactacactggaaaatgtgttaatgacaaatgaagaggaaattcgtcctaccaacccggtagccaccgaggaatacgggactgttagcagcaacctgcaggcggctaacactgcagcccagacacaagttgtcaacaaccagggagccttacctggtatggtctggcagaaccgggacgtgtacctgcagggtcccatctgggccaagattcctcacacggacggcaactttcacccgtctccgctgatgggcggctttggactgaagcatccgcctcctcagatcctgatcaaaaacactcctgttcctgctaatcccccggaggtgtttacgcctgccaagtttgcttctttcatcacacagtacagcaccggccaggtcagcgtggagatcgagtgggagctgcagaaggagaacagcaagcgctggaacccagagattcagtatacctccaattttgacgaacagactggtgtggactttgccgttgacagccagggtgtttattctgagcctcgccccattggtactcgttacctcacccgtaatctgtaa

SEQ ID NO: 444 - protein, 737 aa, Adeno-associated virus
MAADGYLPDWLEDNLSEGIREWWDLKPGAPKPKANQQKQDDGRGLVLPGYKYLGPFNGLDKGEPVSAADAAALEHDKACDQRLKAGDNPYLRYNHADAEFQERLQEDTSFGGNLGRAVFQAKKRVLEPLGLVEEAAKTAPGKKGPVEPSPQRSPDSSTGIGKKGQQPARKRLNFGQTGDSESVPDPQPIGEPPAGPSGLGSGTMAAGGGAPMADNNEGADGVGNASGNWHCDSTWLGDRVITTSTRTWALPTYNNHLYKQISSQSAGSTNDNVYFGYSTPWGYFDFNRFHCHFSPRDWQRLINNNWGFRPKKLNFKLFNIQVKEVTTNDGVTTIANNLTSTVQVFSDSEYQLPYVLGSAHQGCLPPFPADVFMIPQYGYLTLNNGSQSVGRSSFYCLEYFPSQMLRTGNNFTFSYTFEDVPFHSSYAHSQSLDRLMNPLIDQYLYYLARTQSNAGGTAGNRELQFYQGGPTTMAEQAKNWLPGPCFRQQRVSKTLDQNNNSNFAWTGATKYHLNGRNSLVNPGVAMATHKDDEERFFPSSGVLIFGKTGAANKTTLENVLMTNEEEIRPTNPVATEEYGTVSSNLQAANTAAQTQVVNNQGALPGMVWQNRDVYLQGPIWAKIPHTDGNFHPSPLMGGFGLKHPPPQILIKNTPVPANPPEVFTPAKFASFITQYSTGQVSVEIEWELQKENSKRWNPEIQYTSNFDEQTGVDFAVDSQGVYSEPRPIGTRYLTRNL

SEQ ID NO: 445 - DNA, 2214 bp, Adeno-associated virus
atggctgccgatggttatcttccagattggctcgaggacaacctctctgagggcattcgcgagtggtgggacctgaaacctggagccccgaaacccaaagccaaccagcaaaagcaggacgacggccggggtctggtgcttcctggctacaagtacctcggacccttcaacggactcgacaagggggagcccgtcaacgcggcggacgcagcggccctcgagcacgacaaggcctacgaccagcagctcaaagcgggtgacaatccgtacctgcggtataaccacgccgacgccgagtttcaggagcgtctgcaagaagatacgtcttttgggggcaacctcgggcgagcagtcttccaggccaagaagcgggttctcgaacctctcggtctggttgaggaagctgctaagacggctcctggaaagaagagaccggtagaaccgtcacctcagcgttcccccgactcctccacgggcatcggcaagaaaggccagcagcccgctagaaagagactgaactttgggcagactggcgactcagagtcagtccccgaccctcaaccaatcggagaaccaccagcaggcccctctggtctgggatctggtacaatggctgcaggcggtggcgctccaatggcagacaataacgaaggcgccgacggagtgggtaatgcctcaggaaattggcattgcgattccacatggctgggcgacagagtcatcaccaccagcacccgaacctgggctttgcccacctacaacaaccacctctacaagcaaatctccagtcagtcagcaggtagcaccaacgacaacgtctacttcggctacagcaccccctgggggtattttgacttcaacagattccactgtcacttctcaccacgtgactggcagcggctcatcaacaacaactggggattccggcccaagaagctcaacttcaagctgttcaacatccaggtcaaggaggtcacaacgaatgacggcgtcacgaccatcgccaataaccttaccagcacggttcaggtcttttcggactcggaataccagctgccctacgtcctcggctccgcacaccagggctgcctgcctccgttcccggcggacgtcttcatgattcctcagtacggctacctgactctcaacaacggtagtcaggccgtgggacgttcctccttctactgcctggagtacttcccctctcagatgctgagaacgggcaacaacttttccttcagctacactttcgaggacgtgcctttccacagcagctacgcgcacagccagagtttggacaggctgatgaatcctctcatcgaccagtacctgtactacctgtcaagaacccagtctacgggaggcacagcgggaacccagcagttgctgttttctcaggccgggcctagcaacatgtcgactcaggccagaaactggctgcctggaccctgctacagacagcagcgcgtctccacgacactgtcgcaaaacaacaacagcaactttgcctggactggtgccaccaagtatcatctgaacggcagagactctctggtgaatccgggcgtcgccatggcaaccaacaaggacgacgaggaccgcttcttcccatccagcggcatcctcatgtttggcaagcagggagctggaaaagacaacgtggactatagcaacgtgatgctaaccagcgaggaagaaatcaagaccaccaaccccgtggccacagaacagtatggcgtggtggctgataacctacagcagcaaaacaccgctcctattgtgggggccgtcaacagccagggagccttacctggcatggtctggcagaaccgggacgtgtacctgcagggtcctatttgggccaagattcctcacacagatggcaactttcacccgtctcctttaatgggcggctttggacttaaacatccgcctcctcagatccttatcaaaaacactcctgttcctgcggatcctccaacagcgttcaaccaggccaagctgaattctttcatcacgcagtacagcaccggacaagtcagcgtggagatcgagtgggagctgcagaaggagaacagcaagcgctggaacccagagattcagtatacttccaactactacaaatctacaaatgtggactttgctgttaatactgagggtgcttactctgagcctcgccccattggcactcgttacctcacccgtaatctgtaa

SEQ ID NO: 446 - protein, 737 aa, Adeno-associated virus
MAADGYLPDWLEDNLSEGIREWWDLKPGAPKPKANQQKQDDGRGLVLPGYKYLGPFNGLDKGEPVNAADAAALEHDKAYDQQLKAGDNPYLRYNHADAEFQERLQEDTSFGGNLGRAVFQAKKRVLEPLGLVEEAAKTAPGKKRPVEPSPQRSPDSSTGIGKKGQQPARKRLNFGQTGDSESVPDPQPIGEPPAGPSGLGSGTMAAGGGAPMADNNEGADGVGNASGNWHCDSTWLGDRVITTSTRTWALPTYNNHLYKQISSQSAGSTNDNVYFGYSTPWGYFDFNRFHCHFSPRDWQRLINNNWGFRPKKLNFKLFNIQVKEVTTNDGVTTIANNLTSTVQVFSDSEYQLPYVLGSAHQGCLPPFPADVFMIPQYGYLTLNNGSQAVGRSSFYCLEYFPSQMLRTGNNFSFSYTFEDVPFHSSYAHSQSLDRLMNPLIDQYLYYLSRTQSTGGTAGTQQLLFSQAGPSNMSTQARNWLPGPCYRQQRVSTTLSQNNNSNFAWTGATKYHLNGRDSLVNPGVAMATNKDDEDRFFPSSGILMFGKQGAGKDNVDYSNVMLTSEEEIKTTNPVATEQYGVVADNLQQQNTAPIVGAVNSQGALPGMVWQNRDVYLQGPIWAKIPHTDGNFHPSPLMGGFGLKHPPPQILIKNTPVPADPPTAFNQAKLNSFITQYSTGQVSVEIEWELQKENSKRWNPEIQYTSNYYKSTNVDFAVNTEGAYSEPRPIGTRYLTRNL

SEQ ID NO: 447 - DNA, 2217 bp, Adeno-associated virus
atggctgccgatggttatcttccagattggctcgaggacaacctctctgagggcattcgcgagtggtgggacctgaaacctggagccccgaaacccaaagccaaccagcaaaagcaggacgacggccggggtctggtgcttcctggctacaagtacctcggacccttcaacggactcgacaagggggagcccgtcaacgcggcggacgcagcggccctcgagcacgacaaggcctacgaccagcagctcaaagcgggtgacaatccgtacctgcggtataatcacgccgacgccgagtttcaggagcgtctgcaagaagatacgtcttttgggggcaacctcgggcgagcagtcttccaggccaagaagcgggttctcgaacctctcggtctggttgaggaaggcgctaagacggctcctggaaagaagagaccggtagagccgtcaccacagcgttcccccgactcctccacgggcatcggcaagaaaggccagcagcccgccagaaagagactcaatttcggtcagactggcgactcagagtcagtccccgaccctcaacctatcggagaacctccagcagcgccctctagtgtgggatctggtacaatggctgcaggcggtggcgcaccaatggcagacaataacgaaggtgccgacggagtgggtagttcctcgggaaattggcattgcgattccacatggctgggcgacagagtcatcaccaccagcacccgaacctgggccctgcccacctacaacaaccacctctacaagcaaatctccaacgggacctcgggaggcagcaccaacgacaacacctactttggctacagcaccccctgggggtattttgactttaacagattccactgccacttctcaccacgtgactggcagcgactcatcaacaacaactggggattccggcccaagagactcagcttcaagctcttcaacatccaggtcaaagaggtcacgcagaatgaaggcaccaagaccatcgccaataacctcaccagcaccatccaggtgtttacggactcggaataccagctgccgtacgtcctcggctctgcccaccagggctgcctgcctccgttcccggcggacgtcttcatgattcctcagtacggctacctgactctcaacaacggtagtcaggccgtgggacgttcctccttctactgcctggagtacttcccctctcagatgctgagaacgggcaacaacttttccttcagctacactttcgaggacgtgcctttccacagcagctacgcgcacagccagagtttggacaggctgatgaatcctctcatcgaccagtacctgtactacctgtcaagaacccagtctacgggaggcacagcgggaacccagcagttgctgttttctcaggccgggcctagcaacatgtcggctcaggccagaaactggctgcctggaccctgctacagacagcagcgcgtctccacgacactgtcgcaaaacaacaacagcaactttgcctggactggtgccaccaagtatcatctgaacggcagagactctctggtgaatccgggcgtcgccatggcaaccaacaaggacgacgaggaccgcttcttcccatccagcggcatcctcatgtttggcaagcagggagctggaaaagacaacgtggactatagcaacgtgatgctaaccagcgaggaagaaatcaaggccaccaaccccgtggccacagaacagtatggcgtggtggctgataacctacagcagcaaaacaccgctcctattgtgggggccgtcaacagccagggagccttacctggcatggtctggcagaaccgggacgtgtacctgcagggtcctatttgggccaagattcctcacacagatggcaactttcacccgtctcctttaatgggcggctttggacttaaacatccgcctcctcagatcctcatcaaaaacactcctgttcctgcggatcctccaacagcgttcaaccaggccaagctgaattctttcatcacgcagtacagcaccggacaagtcagcgtggagatcgagtgggagctgcagaaggagaacagcaagcgctggaacccagagattcagtatacttccaactactacaaatctacaaatgtggactttgctgttaatactgagggtgtttactctgagcctcgccccattggcactcgttacctcacccgtaatctgtaa

SEQ ID NO: 448 - protein, 738 aa, Adeno-associated virus
MAADGYLPDWLEDNLSEGIREWWDLKPGAPKPKANQQKQDDGRGLVLPGYKYLGPFNGLDKGEPVNAADAAALEHDKAYDQQLKAGDNPYLRYNHADAEFQERLQEDTSFGGNLGRAVFQAKKRVLEPLGLVEEGAKTAPGKKRPVEPSPQRSPDSSTGIGKKGQQPARKRLNFGQTGDSESVPDPQPIGEPPAAPSSVGSGTMAAGGGAPMADNNEGADGVGSSSGNWHCDSTWLGDRVITTSTRTWALPTYNNHLYKQISNGTSGGSTNDNTYFGYSTPWGYFDFNRFHCHFSPRDWQRLINNNWGFRPKRLSFKLFNIQVKEVTQNEGTKTIANNLTSTIQVFTDSEYQLPYVLGSAHQGCLPPFPADVFMIPQYGYLTLNNGSQAVGRSSFYCLEYFPSQMLRTGNNFSFSYTFEDVPFHSSYAHSQSLDRLMNPLIDQYLYYLSRTQSTGGTAGTQQLLFSQAGPSNMSAQARNWLPGPCYRQQRVSTTLSQNNNSNFAWTGATKYHLNGRDSLVNPGVAMATNKDDEDRFFPSSGILMFGKQGAGKDNVDYSNVMLTSEEEIKATNPVATEQYGVVADNLQQQNTAPIVGAVNSQGALPGMVWQNRDVYLQGPIWAKIPHTDGNFHPSPLMGGFGLKHPPPQILIKNTPVPADPPTAFNQAKLNSFITQYSTGQVSVEIEWELQKENSKRWNPEIQYTSNYYKSTNVDFAVNTEGVYSEPRPIGTRYLTRNL

SEQ ID NO: 449 - DNA, 2217 bp, Adeno-associated virus
atggctgccgatggttatcttccagattggctcgaggacaacctctctgagggcattcgcgagtggtgggacctgaaacctggagccccgaaacccaaagccaaccagcaaaagcaggacgacggccggggtctggtgcttcctggctacaagcacctcggacccttcaacggactcgacaagggggagcccgtcaacgcggcggacgcagcggccctcgagcacgacaaggcctacgaccagcagctcaaagcgggtgacaatccgtacctgcggtataatcacgctgacgccgagtttcaggagcgtctgcaagaagatacgtcttttgggggcaacctcgggcgagcagtcttccaggccaagaagcgggttctcgaacctctcggtctggttgaggaaggcgctaagacggctcctggaaagaagagaccggtagagccgtcaccacagcgttcccccgactcctccacgggcatcggcaagaaaggccagcagcccgccagaaagagactcaatttcggtcagactggcgactcagagtcagtccccgaccctcaacctatcggagaacctccagcagcgccctctagtgtgggatctggtacaatggctgcaggcggtggcgcaccaatggcagacaataacgaaggtgccgacggagtgggtagttcctcgggaaattggcattgcgattccacatggctgggcgacagagtcatcaccaccagcacccgaacctgggccctgcccacctacaacaaccacctctacaagcaaatctccaacgggacctcgggaggcagcaccaacgacaacacctactttggctacagcaccccctgggggtattttgactttaacagattccactgccacttctcaccacgtgactggcagcgactcatcaacaacaactggggattccggcccaagagactcagcttcaagctcttcaacatccaggtcaaagaggtcacgcagaatgaaggcaccaagaccatcgccaataaccttaccagcacggttcaggtcttttcggactcggaataccagctgccctacgtcctcggctccgcacaccagggctgcctgcctccgttcccggcggacgtcttcatgattccccagtacggctacctgactctgaacaatggcagccaatcggtgggtcgttcctctttctactgcctggaatatttcccttctcaaatgctgagaacgggcaacaacttcaccttcagctacaccttcgaggacgttcccttccacagcagctacgcacacagccagagcctggaccggctgatgaatcctcttatcgaccagtacctgtattacctggccagaacacagagcaacgcaggaggcacagctggcaatcgggaactgcagttttatcagggcgggcctaccaccatggccgaacaagccaaaaactggctgcctggaccttgcttccggcaacaaagagtctccaagacgctggatcaaaacaacaacagcaactttgcttggactggtgccaccaaataccatctaaatggaagaaattcattggttaatcccggtgtcgccatggcaacccacaaggacgacgaggaacgcttcttcccttcgagcggagtcctgatttttggaaaaactggagcagctaataagactacactggaaaatgtgttaatgacaaatgaagaggaaattcgtcctaccaacccggtagccaccgaggaatacgggactgttagcagcaacctgcaggcggctaacactgcagcccagacacaagttgtcaacaaccagggagccttacctggtatggtctggcagaaccgggacgtgtacctgcagggtcccatctgggccaagattcctcacacggacggcaactttcacccgtctccgctgatgggcggctttggactgaagcatccgcctcctcagatcctgatcaaaaacactcctgttcctgctaatcccccggaggtgtttacgcctgccaagtttgcttctttcatcacacagtacagcaccggccaggtcagcgtggagatcgagtgggagctgcagaaggagaacagcaagcgctggaacccagagattcagtatacctccaattttgacaaacagactggtgtggactttgccgttgacagccagggtgtttattctgagcctcgccccattggtactcgttacctcacccgtaatctgtaa

SEQ ID NO: 450 - protein, 738 aa, Adeno-associated virus
MAADGYLPDWLEDNLSEGIREWWDLKPGAPKPKANQQKQDDGRGLVLPGYKHLGPFNGLDKGEPVNAADAAALEHDKAYDQQLKAGDNPYLRYNHADAEFQERLQEDTSFGGNLGRAVFQAKKRVLEPLGLVEEGAKTAPGKKRPVEPSPQRSPDSSTGIGKKGQQPARKRLNFGQTGDSESVPDPQPIGEPPAAPSSVGSGTMAAGGGAPMADNNEGADGVGSSSGNWHCDSTWLGDRVITTSTRTWALPTYNNHLYKQISNGTSGGSTNDNTYFGYSTPWGYFDFNRFHCHFSPRDWQRLINNNWGFRPKRLSFKLFNIQVKEVTQNEGTKTIANNLTSTVQVFSDSEYQLPYVLGSAHQGCLPPFPADVFMIPQYGYLTLNNGSQSVGRSSFYCLEYFPSQMLRTGNNFTFSYTFEDVPFHSSYAHSQSLDRLMNPLIDQYLYYLARTQSNAGGTAGNRELQFYQGGPTTMAEQAKNWLPGPCFRQQRVSKTLDQNNNSNFAWTGATKYHLNGRNSLVNPGVAMATHKDDEERFFPSSGVLIFGKTGAANKTTLENVLMTNEEEIRPTNPVATEEYGTVSSNLQAANTAAQTQVVNNQGALPGMVWQNRDVYLQGPIWAKIPHTDGNFHPSPLMGGFGLKHPPPQILIKNTPVPANPPEVFTPAKFASFITQYSTGQVSVEIEWELQKENSKRWNPEIQYTSNFDKQTGVDFAVDSQGVYSEPRPIGTRYLTRNL

SEQ ID NO: 451 - protein, 737 aa, Adeno-associated virus
MAADGYLPDWLEDNLSEGIREWWDLKPGAPKPKANQQKQDDGRGLVLPGYKYLGPFNGLDKGEPVNAADAAALEHDKAYDQQLKAGDNPYLRYNHADAEFQERLQEDTSFGGNLGRAVFQAKKRVLEPLGLVEEAAKTAPGKKRPVEPSPQRSPDSSTGIGKKGQQPARKRLNFGQTGDSESVPDPQPIGEPPAGPSGLGSGTMAAGGGAPMADNNKGADGVGNASGNWHCDSTWLGDRVITTSTRTWALPTYNNHLYKQISSQSAGSTNDNVYFGYSTPWGYFDFNRFHCHFSPRDWQRLINSNWGFRPKKLNFKLFNIQVKEVTTNDGVTTIANNLTSTVQVFSDSEYQLPYVLGSAHQGCLPPFPADVFMIPQYGYLTLNNGSQSVGRSSFYCLEYFPSQMLRTGNNFTFSYTFEDVPFHSSYAHSQSLDRLMNPLIDQYLYYLARTQSNAGGTAGNRELQFYQGGPTTMAEQAKNWLPGPCFRQQRVSKTLDQNNNSNFAWTGATKYHLNGRNSLVNPGVAMATHKDDEERFFPSSGVLIFGKTGAANKTTLENVLMTNEEEIRPTNPVATEEYGTVSSNLQAANTAAQTQVVNNQGALPGMVWQNRDVYLQGPIWAKIPHTDGNFHPSPLMGGFGLKHPPPQILIKNTPVPANPPEVFTPAKFASFITQYSTGQVSVEIEWELQKENSKRWNPEIQYTSNFDKQTGVDFAVDSQGVYSEPRPIGTRYLTRNL

SEQ ID NO: 452 - protein, 737 aa, Adeno-associated virus
MAADGYLPDWLEDNLSEGIREWWDLKPGAPKPKANQQKQDDGRGLVLPGYKYLGPFNGLDKGEPVNAADAAALEHDKAYDQQLKAGDNPYLRYNHADAEFQERLQEDTSFGGNLGRAVFQAKKRVLEPLGLVEEAAKTAPGKKRPVEPSPQRSPDSSTGIGKKGQQPARKRLNFGQTGDSESVPDPQPIGEPPAGPSGLGSGTMAAGGGAPMADNNEGADGVGNASGNWHCDSTWLGDRVITTSTRTWALPTYNNHLYKQISSQSAGSTNDNVYFGYSTPWGYFDFNRFHCHFSPRDWQRLINSNWGFRPKKLNFKLFNIQVKEVTTNDGVTTIANNLTSTVQVFSDSEYQLPYVLGSAHQGCLPPFPADVFMIPQYGYLTLNNGSQSVGRSSFYCLEYFPSQMLRTGNNFTFSYTFEDVPFHSSYAHSQSLDRLMNPLIDQYLYYLARTQSNAGGTAGNRELQFYQGGPTTMAEQAKNWLPGPCFRQQRVSKTLDQNNNSNFAWTGATKYHLNGRNSLVNPGVAMATHKDDEERFFPSSGVLIFGKTGAANKTTLENVLMTNEEEIRPTNPVATEEYGTVSSNLQAANTAAQTQVVNNQGALPGMVWQNRDVYLQGPIWAKIPHTDGNFHPSPLMGGFGLKHPPPQILIKNTPVPANPPEVFTPAKFASFITQYSTGQVSVEIEWELQKENSKRWNPEIQYTSNFDKQTGVDFAVDSQGVYSEPRPIGTRYLTRNL

SEQ ID NO: 453 - protein, 737 aa, Adeno-associated virus
MAADGYLPDWLEDNLSEGIREWWDLKPGAPKPKANQQKQDDGRGLVLPGYKYLGPFNGLDKGEPVNAADAAALEHDKAYDQQLKAGDNPYLRYNHADAEFQERLQEDTSFGGNLGRAVFQAKKRVLEPLGLVEEAAKTAPGKKRPVEPSPQRSPDSSTGIGKKGQQPARKRLNFGQTGDSESVPDPQPIGEPPAGPSGLGSGTMAAGGGAPMADNNEGADGVGNASGNWHCDSTWLGDRVITTSTRTWALPTYNNHLYKQISSQSAGSTNDNVYFGYSTPWGYFDFNRFHCHFSPRDWQRLINNNWGFRPKKLNFKLFNIQVKEVTTNDGVTTIANNLTSTVQVFSDSEYQLPYVLGSAHQGCLPPFPADVFMIPQYGYLTLNNGSQSVGRSSFYCLEYFPSQMLRTGNNFTFSYTFEDVPFHSSYAHSQSLDRLMNPLIDQYLYYLARTQSNAGGTAGNRELQFYQGGPTTMAEQAKNWLPGPCFRQQRVSKTLDQNNNSNFAWTGATKYHLNGRNSLVNPGVAMATHKDDEERFFPSSGVLIFGKTGAANKTTLENVLMTNEEEIRPTNPVATEEYGTVSSNLQAANTAAQTQVVNNQGALPGMVWQNRDVYLQGPIWAKIPHTDGNFHPSPLMGGFGLKHPPPQILIKNTPVPANPPEVFTPAKFASFITQYSTGQVSVEIEWELQKENSKRWNPEIQYTSNFDKQTGVDFAVDSQGVYSEPRPIGTRYLTRNL

SEQ ID NO: 454 - protein, 737 aa, Adeno-associated virus
MAADGYLPDWLEDNLSEGIREWWDLKPGAPKPKANQQKQDDGRGLVLPGYKYLGPFNGLDKGEPVNAADAAALEHDKAYDQQLKAGDNPYLRYNHADAEFQERLQEDTSFGGNLGRAVFQAKKRVLEPLGLVEEAAKTAPGKKRPVEPSPQRSPDSSTGIGKKGQQPARKRLNFGQTGDSESVPDPQPIGEPPAGPSGLGSGTMAAGGGAPMADNNKGADGVGNASGNWHCDSTWLGDRVITTSTRTWALPTYNNHLYKQISSQSAGSTNDNVYFGYSTPWGYFDFNRFHCHFSPRDWQRLINNNWGFRPKKLNFKLFNIQVKEVTTNDGVTTIANNLTSTVQVFSDSEYQLPYVLGSAHQGCLPPFPADVFMIPQYGYLTLNNGSQSVGRSSFYCLEYFPSQMLRTGNNFTFSYTFEDVPFHSSYAHSQSLDRLMNPLIDQYLYYLARTQSNAGGTAGNRELQFYQGGPTTMAEQAKNWLPGPCFRQQRVSKTLDQNNNSNFAWTGATKYHLNGRNSLVNPGVAMATHKDDEERFFPSSGVLIFGKTGAANKTTLENVLMTNEEEIRPTNPVATEEYGTVSSNLQAANTAAQTQVVNNQGALPGMVWQNRDVYLQGPIWAKIPHTDGNFHPSPLMGGFGLKHPPPQILIKNTPVPANPPEVFTPAKFASFITQYSTGQVSVEIEWELQKENSKRWNPEIQYTSNFDKQTGVDFAVDSQGVYSEPRPIGTRYLTRNL

SEQ ID NO: 455 - DNA, 2214 bp, Adeno-associated virus
atggctgctgacggttatcttccagattggctcgaggacaacctctctgagggcattcgcgagtggtgggacctgaaacctggagcccccaagcccaaggccaaccagcagaagcaggacgacggccggggtctggtgcttcctggctacaagtacctcggacccttcaacggactcgacaagggggagcccgtcaacgcggcggacgcagcggccctcgagcacgacaaggcctacgaccagcagctcaaagcgggtgacaatccgtacctgcggtataaccacgccgacgccgagtttcaggagcgtctgcaagaagatacgtcttttgggggcaacctcgggcgagcagtcttccaggccaagaagcgggttctcgaacctctcggtctggttgaggaagctgctaagacggctcctggaaagaagagaccggtagaaccgtcacctcagcgttcccccgactcctccacgggcatcggcaagaaaggccagcagcccgctagaaagagactgaactttgggcagactggcgactcagagtcagtccccgaccctcaaccaatcggagaaccaccagcaggcccctctggtctgggatctggtacaatggctgcaggcggtggcgcaccaatggctgacaataacaagggcgccgacggagtgggtaatgcctcaggaaattggcattgcgattccacatggctgggcgacagagtcatcaccaccagcacccgaacctgggctttgcccacctacaacaaccacctctacaagcaaatctccagtcagtcagcaggtagcaccaacgacaacgtctacttcggctacagcaccccctgggggtattttgacttcaacagattccactgtcacttctcaccacgtgactggcagcggctcatcaacagcaactggggattccggcccaagaagctcaacttcaagctgttcaacatccaggtcaaggaggtcacaacgaatgacggcgtcacgaccatcgccaataaccttaccagcacggttcaggtcttttcggactcggaataccagctgccctacgtcctcggctccgcacaccagggctgcctgcctccgttcccggcggacgtcttcatgattccccagtacggctacctgactctgaacaatggcagccaatcggtgggtcgttcctctttctactgcctggaatatttcccttctcaaatgctgagaacgggcaacaacttcaccttcagctacaccttcgaggacgttcccttccacagcagctacgcacacagccagagcctggaccggctgatgaatcctcttatcgaccagtacctgtattacctggccagaacacagagcaacgcaggaggcacagctggcaatcgggaactgcagttttatcagggcgggcctaccaccatggccgaacaagccaaaaactggctgcctggaccttgcttccggcaacaaagagtctccaagacgctggatcaaaacaacaacagcaactttgcttggactggtgccaccaaataccatctaaatggaagaaattcattggttaatcccggtgtcgccatggcaacccacaaggacgacgaggaacgcttcttcccttcgagcggagtcctgatttttggaaaaactggagcagctaataagactacactggaaaatgtgttaatgacaaatgaagaggaaattcgtcctaccaacccggtagccaccgaggaatacgggactgttagcagcaacctgcaggcggctaacactgcagcccagacacaagttgtcaacaaccagggagccttacctggtatggtctggcagaaccgggacgtgtacctgcagggtcccatctgggccaagattcctcacacggacggcaactttcacccgtctccgctgatgggcggctttggactgaagcatccgcctcctcagatcctgatcaaaaacactcctgttcctgctaatcccccggaggtgtttacgcctgccaagtttgcttctttcatcacacagtacagcaccggccaggtcagcgtggagatcgagtgggagctgcagaaggagaacagcaagcgctggaacccagagattcagtatacctccaattttgacaaacagactggtgtggactttgccgttgacagccagggtgtttattctgagcctcgccccattggtactcgttacctcacccgtaatctgtaa

SEQ ID NO: 456 - DNA, 2217 bp, Adeno-associated virus
atggctgccgatggttatcttccagattggctcgaggacaacctctctgagggcattcgcgagtggtgggacctgaaacctggagccccgaaacccaaagccaaccagcaaaagcaggacgacggccggggtctggtgcttcctggctacaagtacctcggacccttcaacggactcgacaagggggagcccgtcaacgcggcggacgcagcggccctcgagcacgacaaggcctacgaccagcagctcaaagcgggtgacaatccgcacctgcggtataatcacgccgacgccgagtttcaggagcgtctgcaagaagatacgtcttttgggggcaacctcgggcgagcagtcttccaggccaagaagcgggttctcgaacctctcggtctggttgaggaaggcgctaagacggctcctggaaagaagagaccggtagagccgtcaccacagcgttcccccgactcctccacgggcatcggcaagaaaggccagcagcccgccagaaagagactcaatttcggtcagactggcgactcagagtcagtccccgaccctcaacttatcggagaacctccagcagcgccctctagtgtgggatctggtacaatggctgcaggcggtggcgcaccaatggcagacaataacgaaggtgccgacggagtgggtagttcctcgggaaattggcattgcgattccacatggctgggcgacagagtcatcaccaccagcacccgaacctgggccctgcccacctacaacaaccacctctacaagcaaatctccaacgggacctcgggaggcagcaccaacgacaacacctactttggctacagcaccccctgggggtattttgactttaacagattccactgccacttctcaccacgtgactggcagcgactcatcaacaacaactggggattccggcccaagagactcagcttcaagctcttcaacatccaggtcaaagaggtcacgcagaatgaaggcaccaagaccatcgccaataacctcaccagcaccatccaggtgtttacggactcggagtaccagctgccgtacgtcctcggctctgcccaccagggctgcctgcctccgttcccggcggacgtcttcatgattcctcagtacggcaacctgactctcaacaacggtagtcaggccgtgggacgttcctccttctactgcctggagtacttcccctctcagatgctgagaacgggcaacaacttttccttcagctacactttcgaggacgtgcctttccacagcagctacgcgcacagccagagtttggacaggctgatgaatcctctcatcgaccagtacctgtactacctgtcaagaacccagtctacgggaggcacagcgggaacccagcagttgctgttttctcaggccgggcctagcaacatgtcggctcaggccagaaactggctgcctggaccctgctacagacagcagcgcgtctccacgacactgtcgcaaaacaacaacagcaactttgcctggactggtgccaccaagtatcatctgaacggcagagactctctggtgaatccgggcgtcgccatggcaaccaacaaggacgacgaggaccgcttcttcccatccagcggcatcctcatgtttggcaagcagggagctggaaaagacaacatgggctatagcaacgtgatgctaaccagcgaggaagaaatcaagaccaccaaccccgtggccacagaacagtatggcgtggtggctgataacctacagcagcaaaacaccgctcctattgtgggggccgtcaacagccagggagccttacctggcatggtctggcagaaccgggacgtgtacctgcagggtcctatttgggccaagattcctcacacagatggcaactttcacccgtctcctttaatgggcggctttggacttaaacatccgcctcctcagatcctcatcaaaaacactcctgttcctgcggatcctccaacagcgttcaaccaggccaagctgaattctttcatcacgcagtacggcaccggacaagtcagcgtggagatcgagtgggagctgcagaaggagaacagcaagcgctggaacccagagattcagtatacttccaactactacaaatctacaaatgtggactttgctgttaatactgagggtgtttactctgagcctcgccccattggcactcgttacctcacccgtaatctgtaa

SEQ ID NO: 457 - protein, 738 aa, Adeno-associated virus
MAADGYLPDWLEDNLSEGIREWWDLKPGAPKPKANQQKQDDGRGLVLPGYKYLGPFNGLDKGEPVNAADAAALEHDKAYDQQLKAGDNPHLRYNHADAEFQERLQEDTSFGGNLGRAVFQAKKRVLEPLGLVEEGAKTAPGKKRPVEPSPQRSPDSSTGIGKKGQQPARKRLNFGQTGDSESVPDPQLIGEPPAAPSSVGSGTMAAGGGAPMADNNEGADGVGSSSGNWHCDSTWLGDRVITTSTRTWALPTYNNHLYKQISNGTSGGSTNDNTYFGYSTPWGYFDFNRFHCHFSPRDWQRLINNNWGFRPKRLSFKLFNIQVKEVTQNEGTKTIANNLTSTIQVFTDSEYQLPYVLGSAHQGCLPPFPADVFMIPQYGNLTLNNGSQAVGRSSFYCLEYFPSQMLRTGNNFSFSYTFEDVPFHSSYAHSQSLDRLMNPLIDQYLYYLSRTQSTGGTAGTQQLLFSQAGPSNMSAQARNWLPGPCYRQQRVSTTLSQNNNSNFAWTGATKYHLNGRDSLVNPGVAMATNKDDEDRFFPSSGILMFGKQGAGKDNMGYSNVMLTSEEEIKTTNPVATEQYGVVADNLQQQNTAPIVGAVNSQGALPGMVWQNRDVYLQGPIWAKIPHTDGNFHPSPLMGGFGLKHPPPQILIKNTPVPADPPTAFNQAKLNSFITQYGTGQVSVEIEWELQKENSKRWNPEIQYTSNYYKSTNVDFAVNTEGVYSEPRPIGTRYLTRNL

SEQ ID NO: 458 - DNA, 2217 bp, Adeno-associated virus
atggctgccgatggttatcttccagattggctcgaggacaacctctctgagggcattcgcgagtggtgggacctgaaacctggagccccgaaacccaaagccaaccagcaaaagcaggacgacggccggggtctggtgcttcctggctacaagtacctcggacccttcaacggactcgacaagggggagcccgtcaacgcggcggacgcagcggccctcgagcacgacaaggcctacgaccagcagctcaaagcgggtgacaatccgtacctgcggtataatcacgccgacgccgagtttcaggagcgtctgcaagaagatacgtcttttgggggcaacctcgggcgagcagtcttccaggccaagaagcgggttctcgaacctctcggtctggttgaggaaggcgctaagacggctcctggaaagaagagaccggtagagccgtcaccacagcgttcccccgactcctccacgggcatcggcaagaaaggccagcagcccgccggaaagagactcaatttcggtcagactggcgactcagagtcagtccccgaccctcaacctatcggagaacctccagcagcgccctctagtgtgggatctggtacaatggctgcaggcggtggcgcaccaatggcagacaataacgaaggtgccgacggagtgggtagttcctcgggaaattggcattgcgattccacatggctgggcgacagagtcatcaccaccagcacccgaacctgggccctgcccacctacaacaaccacctctacaagcaaatctccaacgggacctcgggaggcagcaccaacgacaacacctactttggctacagcaccccctgggggtattttgactttaacagattccactgccacttctcaccacgtgactggcagcgactcatcaacaacaactggggattccggcccaagagactcagcttcaagctcttcaacatccaggtcaaagaggtcacgcagaatgaaggcaccaagaccatcgccaataacctcaccagcaccatccaggtgtttacggactcggaataccagctgccgtacgtcctcggctctgcccaccagggctgcctgcctccgttcccggcggacgtcttcatgattcctcagtacggctacctgactctcaacaacggtagtcaggccgtgggacgttcctccttctactgcctggagtacttcccctctcagatgctgagaacgggcaacaacttttccttcagctacactttcgaggacgtgcctttccacagcagctacgcgcacagccagagtttggacaggctgatgaatcctctcgtcgaccagtacctgtactacctgtcaagaacccagtctacgggaggcacagcgggaacccagcagttgctgttttctcaggccgggcctagcaacatgtcggctcaggccagaaactggctgcctggaccctgctacagacagcagcgcgtctccacgacactgtcgcaaaacaacaacagcaactttgcctggactggtgccaccaagtatcatctgaacggcagagactctctggtgaatccgggcgtcgccatggcaaccaacaaggacgacgaggaccgcttcttcccatccagcggcatcctcatgtttggcaagcagggagctggaaaagacaacgtggactatagcaacgtgatgctaaccagcgaggaagaaatcaagaccaccaaccccgtggccacagaacagtatggcgtggtggctgataacctacagcagcaaaacaccgctcctattgtgggggccgtcaacagccagggagccttacctggcatggtctggcagaaccgggacgtgtacctgcagggtcctatttgggccaagattcctcacacagatggcaactttcacccgtctcctttaatgggcggctttggacttaaacatccgcctcctcagatcctcatcaaaaacactcctgttcctgcggatcctccaacagcgttcaaccaggccaagctgaattctttcatcacgcagtacagcaccggacaagtcagcgtggagatcgagtgggagctgcagaaggagaacagcaagcgctggagcccagagattcagtatacttccaactactacaaatctacaaatgtggactttgctgttaatactgagggtgtttactctgagcctcgccccattggcactcgttacctcacccgtaatctgtaa

SEQ ID NO: 459 - protein, 738 aa, Adeno-associated virus
MAADGYLPDWLEDNLSEGIREWWDLKPGAPKPKANQQKQDDGRGLVLPGYKYLGPFNGLDKGEPVNAADAAALEHDKAYDQQLKAGDNPYLRYNHADAEFQERLQEDTSFGGNLGRAVFQAKKRVLEPLGLVEEGAKTAPGKKRPVEPSPQRSPDSSTGIGKKGQQPAGKRLNFGQTGDSESVPDPQPIGEPPAAPSSVGSGTMAAGGGAPMADNNEGADGVGSSSGNWHCDSTWLGDRVITTSTRTWALPTYNNHLYKQISNGTSGGSTNDNTYFGYSTPWGYFDFNRFHCHFSPRDWQRLINNNWGFRPKRLSFKLFNIQVKEVTQNEGTKTIANNLTSTIQVFTDSEYQLPYVLGSAHQGCLPPFPADVFMIPQYGYLTLNNGSQAVGRSSFYCLEYFPSQMLRTGNNFSFSYTFEDVPFHSSYAHSQSLDRLMNPLVDQYLYYLSRTQSTGGTAGTQQLLFSQAGPSNMSAQARNWLPGPCYRQQRVSTTLSQNNNSNFAWTGATKYHLNGRDSLVNPGVAMATNKDDEDRFFPSSGILMFGKQGAGKDNVDYSNVMLTSEEEIKTTNPVATEQYGVVADNLQQQNTAPIVGAVNSQGALPGMVWQNRDVYLQGPIWAKIPHTDGNFHPSPLMGGFGLKHPPPQILIKNTPVPADPPTAFNQAKLNSFITQYSTGQVSVEIEWELQKENSKRWSPEIQYTSNYYKSTNVDFAVNTEGVYSEPRPIGTRYLTRNL

SEQ ID NO: 460 - DNA, 2217 bp, Adeno-associated virus
atggttgccgatggttatcttccagattggctcgaggacaacctctctgagggcattcgcgagtggtgggacctgaaacctggagccccgaaacccaaagccaaccagcaaaagcagggcgacggccggggtctggtgcttcctggctacaagtacctcggacccttcaacggactcgacaagggggagcccgtcaacgcggcggacgcagcggccctcgagcacgacaaggcctacgaccagcagcttaaagcgggtgacaatccgtacctgcggtataatcacgccgacgccgagcttcaggagcgtctgcaagaagatacgtcttttgggggcaacctcgggcgagcagtcttccaggccaagaagcgggttctcgaacctctcggtctggttgaggaaggcgctaagacggctcctggaaagaagagaccggtagagccgtcaccacagcgttcccccgactcctccacgggcatcggcaagaaaggccagcagcccgccagaaagagactcaatttcggtcagactggcgactcagagtcagtccccgaccctcaacctatcggagaacctccagcagcgccctctagtgtgggatctggtacaatggctgcaggcggtggcgcgccaatggcagacaataacgaaggtgccgacggagtgggtagttcctcgggaaattggcattgcgattccacatggctgggcgacagagtcatcaccaccagcacccgaacctgggccctgcccacctacaacaaccacctctacaagcaaatctccaacgggacctcgggaggcagcaccaacgacaacacctactttggctacagcaccccctgggggtattttgactttaacagattccactgccacttctcaccacgtgactggcagcgactcatcaacaacaactggggattccggcccaagagactcagcttcaagctcttcaacatccaggtcaaagaggtcacgcagaatgaaggcaccaagaccatcgccaataacctcaccagcaccatccaggtgtttacggactcggaataccagctgccgtacgtcctcggctctgcccaccagggctgccagcctccgttcccggcggacgtcttcatgattcctcagtacggctacctgactctcaacaacggtagtcaggccgtgggacgttcctccttctactgcctggagtacttcccctctcagatgctgagaacgggcaacaacttttccttcagctacactttcgaggacgtgcctttccacagcagctacgcgcacagccagagtttggacaggctgatgaatcctctcatcgaccagtacctgtactacctgtcaagaacccagtctacgggaggcacagcgggaacccagcagttgctgttttctcaggccgggcctagcaacatgtcggctcaggccagaaactggctgcctggaccctgctacagacagcagcgcgtctccacgacactgtcgcaaaacaacaacagcaactttgcctggactggtgccaccaagtatcatctgaacggcagagactctctggtgaatccgggcgtcgccatggcaaccaacaaggacgacgaggaccgcttcttcccatccagcggcatcctcatgtttggcaagcagggagctggaaaagacaacgtggactatagcaacgtgatgctaaccagcgaggaagaaatcaagaccaccaaccccgtggccacagaacagtatggcgtggtggctgataacctacagcagcaaaacaccgctcctattgtgggggccgtcaacagccagggagccttacctggcatggtctggcagaaccgggacgtgtacctgcagggtcctatttgggccaagattcctcacacagatggcaactttcacccgtctcctttaatgggcggctttggacttaaacatccgcctcctcagatcctcatcaaaaacactcctgttcctgcggatcctccaacagcgttcaaccaggccaagctgaattctttcatcacgcagtacagcaccggacaagtcagcgtggagatcgagtgggagccgcagaaggagaacagcaagcgctggaacccagagattcagtatacttccaactactacaaatctacaaatgtggactttgctgttaatactgagggtgtttactctgagcctcgccccattggcactcgttacctcacccgtaatctgtaa

SEQ ID NO: 461 - protein, 738 aa, Adeno-associated virus
MVADGYLPDWLEDNLSEGIREWWDLKPGAPKPKANQQKQGDGRGLVLPGYKYLGPFNGLDKGEPVNAADAAALEHDKAYDQQLKAGDNPYLRYNHADAELQERLQEDTSFGGNLGRAVFQAKKRVLEPLGLVEEGAKTAPGKKRPVEPSPQRSPDSSTGIGKKGQQPARKRLNFGQTGDSESVPDPQPIGEPPAAPSSVGSGTMAAGGGAPMADNNEGADGVGSSSGNWHCDSTWLGDRVITTSTRTWALPTYNNHLYKQISNGTSGGSTNDNTYFGYSTPWGYFDFNRFHCHFSPRDWQRLINNNWGFRPKRLSFKLFNIQVKEVTQNEGTKTIANNLTSTIQVFTDSEYQLPYVLGSAHQGCQPPFPADVFMIPQYGYLTLNNGSQAVGRSSFYCLEYFPSQMLRTGNNFSFSYTFEDVPFHSSYAHSQSLDRLMNPLIDQYLYYLSRTQSTGGTAGTQQLLFSQAGPSNMSAQARNWLPGPCYRQQRVSTTLSQNNNSNFAWTGATKYHLNGRDSLVNPGVAMATNKDDEDRFFPSSGILMFGKQGAGKDNVDYSNVMLTSEEEIKTTNPVATEQYGVVADNLQQQNTAPIVGAVNSQGALPGMVWQNRDVYLQGPIWAKIPHTDGNFHPSPLMGGFGLKHPPPQILIKNTPVPADPPTAFNQAKLNSFITQYSTGQVSVEIEWEPQKENSKRWNPEIQYTSNYYKSTNVDFAVNTEGVYSEPRPIGTRYLTRNL

SEQ ID NO: 462 - DNA, 2217 bp, Adeno-associated virus
atggctgccgatggttatcttccagattggctcgaggacaacctctctgagggcattcgcgagtggtgggacctgaaacctggagccccgaaacccaaagccaaccagcaaaagcaggacgacggccggggtctggtgcttcctggctacaagtacctcggacccttcaacggactcgacaagggggagcccgtcaacgcggcggacgcagcggccctcgagcacgacaaggcctacgaccagcagctcaaagcgggtgacaatccgtacctgcggtataatcacgccgacgccgagtttcaggagcgtctgcaagaagatacgtcttttgggggcaacctcgggcgagcagtcttccaggccaagaagcgggttctcgaacctctcggtctggttgaggaaggcgctaagacggctcctggaaagaagagaccggtagagccgtcaccacagcgttcccccgactcctccacgggcatcggcaagaaaggccagcagcccgccagaaagagactcaatttcggtcagactggcgactcagagtcagtccccgaccctcaacctatcggagaacctccagcagcgccctctagtgtgggatctggtacaatggctgcaggcggtggcgcaccaatggcagacaataacgaaggtgccgacggagtgggtagttcctcgggaaattggcattgcgattccacatggctgggcgacagagtcatcaccaccagcacccgaacctgggccctgcccacctacaacaaccacctctacaagcaaatctccaacgggacctcgggaggcagcaccaacgacaacacctactttggctacagcaccccctgggggtattttgactttaacagattccactgccacttctcaccacgtgactggcagcgactcatcaacaacaactggggattccggcccaagagactcagcttcaagctcttcaacatccaggtcaaagaggtcacgcagaatgaaggcaccaagaccatcgccaatagcctcaccagcaccatccaggtgtttacggactcggaataccagctgccgtacgtcctcggctctgcccaccagggctgcctgcctccgttcccggcggacgtcttcatgattcctcagtacggctacctgactcccaacaacggtagtcaggccgtgggacgttcctccttctactgcctggagtacttcccctctcagatgctgagaacgggcaacaacttttccttcagctacactttcgaggacgtgcctttccacagcagctacgcgcacagccagagtttggacaggctgatgaatcctctcatcgaccagtacctgtactacctgtcaagaacccagtctacgggaggcacagcgggaacccagcagttgctgtcttctcaggccgggcctagcaacatgtcggctcaggccagaaactggctgcctggaccctgctacagacagcagcgcgtctccacgacactgtcgcaaaacaacaacagcaactttgcctggactggtgccaccaagtatcatctgaacggcagagactctctggtgaatccgggcgtcgccatggcaaccaacaaggacgacgaggaccgcttcttcccatccagcggcatcctcatgtttggcaagcagggagctggaaaagacaacgtggactatagcaacgtgatgctaaccagcgaggaagaaatcaagaccaccaaccccgtggccacagaacagtatggcgtggtggctgataacctacagcagcaaaacaccgctcctattgtgggggccgtcaacagccagggagccttacctggcatggtctggcagaaccgggacgtgtacttgcagggtcctatttgggccaagattcctcacacagatggcaactttcacccgtctcctttaatgggcggctttggacttaaacatccgcctcctcagatcctcatcaaaaacactcctgttcctgcggatcctccaacagcgttcaaccaggccaagctgaattctttcatcacgcagtacagcaccggacaagtcagcgtggagatcgagtgggagctgcagaaggagaacagcaagcgctggaacccagagattcagtatacttccaactactacaaatctacaaatgtggactttgctgttaatactgagggtgtttactctgagcctcgccccattggcactcgttacctcacccgtaatctgtaa

SEQ ID NO: 463 - protein, 738 aa, Adeno-associated virus
MAADGYLPDWLEDNLSEGIREWWDLKPGAPKPKANQQKQDDGRGLVLPGYKYLGPFNGLDKGEPVNAADAAALEHDKAYDQQLKAGDNPYLRYNHADAEFQERLQEDTSFGGNLGRAVFQAKKRVLEPLGLVEEGAKTAPGKKRPVEPSPQRSPDSSTGIGKKGQQPARKRLNFGQTGDSESVPDPQPIGEPPAAPSSVGSGTMAAGGGAPMADNNEGADGVGSSSGNWHCDSTWLGDRVITTSTRTWALPTYNNHLYKQISNGTSGGSTNDNTYFGYSTPWGYFDFNRFHCHFSPRDWQRLINNNWGFRPKRLSFKLFNIQVKEVTQNEGTKTIANSLTSTIQVFTDSEYQLPYVLGSAHQGCLPPFPADVFMIPQYGYLTPNNGSQAVGRSSFYCLEYFPSQMLRTGNNFSFSYTFEDVPFHSSYAHSQSLDRLMNPLIDQYLYYLSRTQSTGGTAGTQQLLSSQAGPSNMSAQARNWLPGPCYRQQRVSTTLSQNNNSNFAWTGATKYHLNGRDSLVNPGVAMATNKDDEDRFFPSSGILMFGKQGAGKDNVDYSNVMLTSEEEIKTTNPVATEQYGVVADNLQQQNTAPIVGAVNSQGALPGMVWQNRDVYLQGPIWAKIPHTDGNFHPSPLMGGFGLKHPPPQILIKNTPVPADPPTAFNQAKLNSFITQYSTGQVSVEIEWELQKENSKRWNPEIQYTSNYYKSTNVDFAVNTEGVYSEPRPIGTRYLTRNL

SEQ ID NO: 464 - protein, 738 aa, Adeno-associated virus
MAADGYLPDWLEDNLSEGIREWWDLKPGAPKPKANQQKQDDGRGLVLPGYKYLGPFNGLDKGEPVNAADAAALEHDKAYDQQLKAGDNPYLRYNHADAEFQERLQEDTSFGGNLGRAVFQAKKRVLEPLGLVEEGAKTAPGKKRPVEPSPQRSPDSSTGIGKKGQQPARKRLNFGQTGDSESVPDPQPIGEPPAAPSSVGSGTMAAGGGAPMADNNEGADGVGSSSGNWHCDSTWLGDRVITTSTRTWALPTYNNHLYKQISNGTSGGSTNDNTYFGYSTPWGYFDFNRFHCHFSPRDWQRLINNNWGFRPKRLSFKLFNIQVKEVTQNEGTKTIANNLTSTIQVFTDSEYQLPYVLGSAHQGCLPPFPADVFMIPQYGYLTLNNGSQAVGRSSFYCLEYFPSQMLRTGNNFSFSYTFEDVPFHSSYVHSQSLDRLMNPLIDQYLYYLSRTQSTGGTAGTQQLLFSQAGPSNMSAQARNWLPGPCYRQQRVSTTLSQNNNSNFAWTGATKYHLNGRDSLVNSGVAMATNKDDEDRFFPSSGILMFGKQGAGKDNVDYSNVMLTSEEEIKTTNPVATEQYGVVADNLQQQNTAPIVGAVNSQGALPGMVWQNRDVYLQGPIWAKIPHTDGNFHPSPLMGGFGLKHPPPQILIKNTPVPADPPTAFNQAKLNSFITQYSTGQVSVEIEWELQKENSKRWNPEIQYTSNYYKSTNVDFAVNTEGVYSEPRPIGTRYPTRNL

SEQ ID NO: 465 - DNA, 2217 bp, Adeno-associated virus
atggctgccgatggttatcttccagattggctcgaggacaacctctctgagggcattcgcgagtggtgggacctgaaacctggagccccgaaacccaaagccaaccagcaaaagcaggacgacggccggggtctggtgcttcctggctacaagtacctcggacccttcaacggactcgacaagggggagcccgtcaacgcggcggacgcagcggccctcgagcacgacaaggcctacgaccagcagctcaaagcgggtgacaatccgtacctgcggtataatcacgccgacgccgagtttcaggagcgtctgcaagaagatacgtcttttgggggcaacctcgggcgagcagtcttccaggccaagaagcgggttctcgaacctctcggtctggttgaggaaggcgctaagacggctcctggaaagaagagaccggtagagccgtcaccacagcgttcccccgactcctccacgggcatcggcaagaaaggccagcagcccgccagaaagagactcaatttcggtcagactggcgactcagagtcagtccccgaccctcaacctatcggagaacctccagcagcgccctctagtgtgggatctggtacaatggctgcaggcggtggcgcaccaatggcagacaataacgaaggtgccgacggagtgggtagttcctcgggaaattggcattgcgattccacatggctgggcgacagagtcatcaccaccagcacccgaacctgggccctgcccacctacaacaaccacctctacaagcaaatctccaacgggacctcgggaggcagcaccaacgacaacacctactttggctacagcaccccctgggggtattttgactttaacagattccactgccacttctcaccacgtgactggcagcgactcatcaacaacaactggggattccggcccaagagactcagcttcaagctcttcaacatccaggtcaaagaggtcacgcagaatgaaggcaccaagaccatcgccaataacctcaccagcaccatccaggtgtttacggactcggaataccagctgccgtacgtcctcggctctgcccaccagggctgcctgcctccgttcccggcggacgtcttcatgattcctcagtacggctacctgactctcaacaacggtagtcaggccgtgggacgttcctccttctactgcctggagtacttcccctctcagatgctgagaacgggcaacaacttttccttcagctacactttcgaggacgtgcctttccacagcagctacgtgcacagccagagtttggacaggctgatgaatcctctcatcgaccagtacctgtactacctgtcaagaacccagtctacgggaggcacagcgggaacccagcagttgctgttttctcaggccgggcctagcaacatgtcggctcaggccagaaactggctgcctggaccctgctacagacagcagcgcgtctccacgacactgtcgcaaaacaacaacagcaactttgcctggactggtgccaccaagtatcatctgaacggcagagactctctggtgaattcgggcgtcgccatggcaaccaacaaggacgacgaggaccgcttcttcccatccagcggcatcctcatgtttggcaagcagggagctggaaaagacaacgtggactatagcaacgtgatgctaaccagcgaggaagaaatcaagaccaccaaccccgtggccacagaacagtatggcgtggtggctgataacctacagcagcaaaacaccgctcctattgtgggggccgtcaacagccagggagccttacctggcatggtctggcagaaccgggacgtgtacctgcagggtcctatttgggccaagattcctcacacagatggcaactttcacccgtctcctttaatgggcggctttggacttaaacatccgcctcctcagatcctcatcaaaaacactcctgttcctgcggatcctccaacagcgttcaaccaggccaagctgaattctttcatcacgcagtacagcaccggacaagtcagcgtggagatcgagtgggagctgcagaaggagaacagcaagcgctggaacccagagattcagtatacttccaactactacaaatctacaaatgtggactttgctgttaatactgagggtgtttactctgagcctcgccccattggcactcgttaccccacccgtaatctgtaa

SEQ ID NO: 466 - protein, 734 aa, Adeno-associated virus; identical to SEQ ID NO: 291

SEQ ID NO: 467 - DNA, 2214 bp, Adeno-associated virus
atggctgctgacggttatcttccagattggctcgaggacaacctctctgagggcattcgcgagtggtgggacctgaaacctggagccccgaaacccaaagccaaccagcagaagcaggacgacggccggggtctggtgcttcctggctacaagtacctcggacccttcaacggactcgacaagggggagcccgtcaacgcggcggacgcagcggccctcgagcacgacaaggcctacgaccagcagctcaaagcgggtgacaatccgtacctgcggtataaccacgccgacgccgagtttcaggagcgtctgcaagaagatacgtcttttgggggcaacctcgggcgagcagtcttccaggccaagaagcgggttctcgaacctctcggtctggttgaggaagctgctaagacggctcctggaaagaagagaccggtagaaccgtcacctcagcgttcccccgactcctccacgggcatcggcaagaaaggccagcagcccgctagaaagagactgaactttgggcagactggcgactcagagtcagtccccgaccctcaacctctcggagaaccaccagcaggcccctctggtctgggatctggtacaatggctgcaggcggtggcgctccaatggcagacaataacgaaggcgccgacggagtgggtaatgcctcaggaaattggcattgcgattccacatggctgggcgacagagtcatcaccaccagcacccgaacctgggctttgcccacctacaacaaccacctctacaagcaaatctccagtcagtcagcaggtagcaccaacgacaacgtctacttcggctacagcaccccctgggggtattttgacttcaacagattccactgtcacttctcaccacgtgactggcagcgactcatcaacaacaactggggattccggcccaagaagctcaacttcaagctcttcaacatccaagtcaaggaggtcacgacgaatgacggcgtcacgaccatcgctaataaccttaccagcacggttcaggtcttttcggactcggagtaccagctgccgtacgtcctcggctctgcccaccagggctgcctgcctccgttcccggcggacgtcttcatgattcctcagtacggctacctgactctgaacaatggcagccaatcggtgggacgttcatccttctactgcctggaatacttcccttctcaggtgctgagaacgggtaacaacttcaccttcagttacaccttcgaggacgtgcctttccacagcagctacgcgcacagccagagcctagaccggctgatgaatcccctcatcgaccagtacctgtattacctggctagaacacagagtaacccaggaggcacatctggcaatcgggaactgcagttttaccagggcgggccttccaccatggccgaacaagccaagaactggttacctggaccttgcttccggcaacaaagagtttccaaaacactggatcaaaacaacaacagcaactttgcttggactggtgccaccaaatatcacctgaacggcagaaactcattggtgaatcctggtgtcgccatggcaactcacaaggacgacgaggaccgctttttcccatccagcggagtcctgatttttggaaaaactggagcaaccaacaagactacattggaaaacgtgttaatgacaaatgaagaagaaattcgtcctactaatcctgtggccacagaagaatacgggatagtcagcagcaatttacaagcggccaatactgcagcccagacacaagttgtcaacaaccagggagccttacctggcatggtctggcagaaccgggacgtgtacctgcagggtcccatctgggccaaaattcctcacacagacggcaactttcacccgtctccgctgatgggcggctttggactgaagcatccgcctcctcagatcctgatcaaaaacactcctgttcctgctaatcccccggaggtgtttacgcctgccaagtttgcttctttcatcacacagtacagcaccggccaggtcagcgtggagatcgagtgggagctgcagaaggagaacagcaagcgctggaacccagagattcagtatacctccaattttgacaaacagactggtgtggactttgccgttgacagccagggtgtttattctgagcctcgccccattggtactcgttacctcacccgtaatctgtaa

SEQ ID NO: 468 - protein, 737 aa, Adeno-associated virus
MAADGYLPDWLEDNLSEGIREWWDLKPGAPKPKANQQKQDDGRGLVLPGYKYLGPFNGLDKGEPVNAADAAALEHDKAYDQQLKAGDNPYLRYNHADAEFQERLQEDTSFGGNLGRAVFQAKKRVLEPLGLVEEAAKTAPGKKRPVEPSPQRSPDSSTGIGKKGQQPARKRLNFGQTGDSESVPDPQPLGEPPAGPSGLGSGTMAAGGGAPMADNNEGADGVGNASGNWHCDSTWLGDRVITTSTRTWALPTYNNHLYKQISSQSAGSTNDNVYFGYSTPWGYFDFNRFHCHFSPRDWQRLINNNWGFRPKKLNFKLFNIQVKEVTTNDGVTTIANNLTSTVQVFSDSEYQLPYVLGSAHQGCLPPFPADVFMIPQYGYLTLNNGSQSVGRSSFYCLEYFPSQVLRTGNNFTFSYTFEDVPFHSSYAHSQSLDRLMNPLIDQYLYYLARTQSNPGGTSGNRELQFYQGGPSTMAEQAKNWLPGPCFRQQRVSKTLDQNNNSNFAWTGATKYHLNGRNSLVNPGVAMATHKDDEDRFFPSSGVLIFGKTGATNKTTLENVLMTNEEEIRPTNPVATEEYGIVSSNLQAANTAAQTQVVNNQGALPGMVWQNRDVYLQGPIWAKIPHTDGNFHPSPLMGGFGLKHPPPQILIKNTPVPANPPEVFTPAKFASFITQYSTGQVSVEIEWELQKENSKRWNPEIQYTSNFDKQTGVDFAVDSQGVYSEPRPIGTRYLTRNL

SEQ ID NO: 469 - DNA, 2214 bp, Adeno-associated virus
atggctgccgatggttatcttccagattggctcgaggacaacctctctgagggcattcgcgagtggtgggacctgaaacctggagccccgaaacccaaagccaaccagcaaaagcaggacgacggccggggtctggtgcttcctggctacaagtacctcggacccttcaacggactcgacaagggggagcccgtcaacgcggcggacgcagcggccctcgagcacgacaaggcctacgaccagcagctcaaagcgggtgacaatccgtacctgcggtataatcacgccgacgccgagtttcaggagcgtctgcaagaagatacgtcttttgggggcaacctcgggcgagcagtcttccaggccaagaagcgggttctcgaacctctcggtctggttgaggaaggcgctaagacggctcctggaaagaagagaccggtagagccgtcaccacagcgttcccccgactcctccacgggcatcggcaagaaaggccagcagcccgccagaaagagactcaatttcggtcagactggcgactcagagtcagtccccgaccctcaacctatcggagaacctccagcagcgccctctagtgtgggatctggtacaatggctgcaggcggtggcgcaccaatggcagacaataacgaaggtgccgacggagtgggtagttcctcgggaaattggcattgcgattccacacggctgggcgacagagtcatcaccaccagcacccggacctgggctttgcccacctacaacaaccacctctacaagcaaatctccagtcagtcagcaggtagcaccaacgacaacgtctacttcggctacagcaccccctgggggtattttgacttcaacagattccactgtcacttctcaccacgtgactggcagcggctcatcaacaacaactggggattccggcccaagaagctcaacttcaagctgttcaacatccaggtcaaggaggtcacaacgaatgacggcgtcacgaccatcgccaataaccttaccagcacggttcaggtcttttcggactcggaataccagctgccctacgtcctcggctccgcacaccagggctgcctgcctccgttcccggcggacgtcttcatgattccccagtacggctacctgactctgaacaatggcagccaatcggtgggtcgttcctctttctactgcctggaatatttcccttctcaaatgctgagaacgggcaacaacttcaccttcagctacaccttcgaggacgttcccttccacagcagctacgcacacagccagagcctggaccggctgatgaatcctcttatcgaccagtacctgtattacctggccagaacacagagcaacgcaggaggcacagctggcaatcgggaactgcagttttatcagggcgggcctaccaccatggccgaacaagccaaaaactggctgcctggaccttgcttccggcaacgaagagtctccaagacgctggatcaaaacaacaacagcaactttgcttggactggtgccaccaaataccatctaaatggaagaaattcattggttaatcccggtgtcgccatggcaacccacaaggacgacgaggaacgcttcttcccttcgagcggagtcctgatttttggaaaaactggagcagctaataagactacactggaaaatgtgttaatgacaaatgaagaggaaattcgtcctaccaacccggtagccaccgaggaatacgggactgttagcagcaacctgcaggcggctaacactgcagcccagacacaagttgtcaacaaccagggagccttacctggtatggtctggcagaaccgggacgtgtacctgcagggtcccatctgggccaagattcctcacacggacggcaactttcacccgtctccgctgatgggcggctttggactgaagcatccgcctcctcagatcctgatcaaaaacactcctgttcctgctaatcccccggaggtgtttacgcctgccaagtttgcttctttcatcacacagtacagcaccggccaggtcagcgtggagatcgagtgggagctgcagaaggagaacagcaagcgctggaacccagagattcagtatacctccaattttgacaaacagactggtgtggactttgccgttgacagccagggtgtttattctgagcctcgccccattggtactcgttacctcacccgtaatctgtaa

SEQ ID NO: 470 - protein, 737 aa, Adeno-associated virus
MAADGYLPDWLEDNLSEGIREWWDLKPGAPKPKANQQKQDDGRGLVLPGYKYLGPFNGLDKGEPVNAADAAALEHDKAYDQQLKAGDNPYLRYNHADAEFQERLQEDTSFGGNLGRAVFQAKKRVLEPLGLVEEGAKTAPGKKRPVEPSPQRSPDSSTGIGKKGQQPARKRLNFGQTGDSESVPDPQPIGEPPAAPSSVGSGTMAAGGGAPMADNNEGADGVGSSSGNWHCDSTRLGDRVITTSTRTWALPTYNNHLYKQISSQSAGSTNDNVYFGYSTPWGYFDFNRFHCHFSPRDWQRLINNNWGFRPKKLNFKLFNIQVKEVTTNDGVTTIANNLTSTVQVFSDSEYQLPYVLGSAHQGCLPPFPADVFMIPQYGYLTLNNGSQSVGRSSFYCLEYFPSQMLRTGNNFTFSYTFEDVPFHSSYAHSQSLDRLMNPLIDQYLYYLARTQSNAGGTAGNRELQFYQGGPTTMAEQAKNWLPGPCFRQRRVSKTLDQNNNSNFAWTGATKYHLNGRNSLVNPGVAMATHKDDEERFFPSSGVLIFGKTGAANKTTLENVLMTNEEEIRPTNPVATEEYGTVSSNLQAANTAAQTQVVNNQGALPGMVWQNRDVYLQGPIWAKIPHTDGNFHPSPLMGGFGLKHPPPQILIKNTPVPANPPEVFTPAKFASFITQYSTGQVSVEIEWELQKENSKRWNPEIQYTSNFDKQTGVDFAVDSQGVYSEPRPIGTRYLTRNL

SEQ ID NO: 471 - DNA, 2208 bp, Adeno-associated virus
atggctgccgatggttatcttccagattggctcgaggacactctctctgaaggaataagacagtggtggaagctcaaacctggcccaccaccaccaaagcccgcagagcggcataaggacgacagcaggggtcttgtgcttcctgggtacaagtacctcggacccttcaacggactcgacaagggggagccggtcaacgaggcagacgccgcggccctcgagcacgacaaggcctacgaccggcagctcgacagcggagacaacccgtacctcaagtacaaccacgccgacgcggagtttcaggagcgtcttaaagaagatacgtcttttgggggcaacctcggacgagcagtcttccaggcgaaaaagagggttcttgaacctctgggcctggttgaggaacctgttaagacggctccgggaaaaaagaggccggtagagcactctcctgcggagccagactcctcctcgggaaccggaaaagcgggccagcagcctgcaagaaaaagattgaattttggtcagactggagacgcagactccgtacctgacccccagcctctcggacagccaccagcagccccctctggtttgggatctactacaatggctacaggcagtggcgcaccaatggcagacaataacgagggtgccgatggagtgggtaattcttcaggaaattggcattgcgattcccaatggctgggcgacagagtcatcaccaccagcacccgaacctgggcccagcccacctacaacaaccacctctacaagcaaatctcaagccaatcaggagcctcaaacgacaaccactactttggctacagcaccccttgggggtattttgacttcaacagattccactgccacttttcaccacgtgactggcaaagactcatcaacaacaactggggattccgacccaagagactcaacttcaagctctttaacattcaagtcaaagaggtcacgcagaatgacggtacgacgacgattgccaataaccttaccagcacggttcaggtgtttactgactcggagtaccagctcccgtacgtcctcgggtcggcgcatcaaggatgcctcccgccgtttccagcggacgtcttcatggtcccacagtatggatacctcaccctgaacaacgggagtcaggcggtaggacgctcttccttttactgcctggagtactttccttctcagatgcttcgtactggaaacaactttcagttcagctacacctttgaagacgttcctttccacagcagctacgctcacagccagagtctggatcggctgatgaatcctctgatcgaccagtacctgtattatctgaacaaaacacaatcaaatagtggagctcttcagcagtctcggctactgtttagtcaagctggacccaccagcatgtctcttcaagctaaaaactggctacctggaccttgctacagacagcagcgtctgtcaaagcaggcaaacgacaacaacaacagcaactttccctggactgcggctacaaagtaccacctaaatggccgggactcgttggttaatccaggaccagctatggccagtcacaaagacgatgaagaaaagtttttccccatgcatggaaccctgatatttggtaaacaaggaacaaatgctaacgacgcggatttggacaatgtcatgattacagatgaagaagaaatccgcaccaccaatcccgtggctacggagcagtacggatatgtgtcaaataatttgcaaaactcaaatactggtccaactactggaactgtcaatcaccgaggagcgttacctggcatggtgtggcaggatcgagacgtgtacctgcagggacccatttgggccaagattcctcacaccgatggacactttcatccttctccactgatgggaggttttgggctcaaacacccgcctcctcagatcatgatcaaaaacactcccgttccagccaatcctcccacaaacttcagttctgccaagtttgcttctttcatcacacagtattccacggggcaggtcagcgtggagatcgagtgggagctgcagaaagagaacagcaaacgctggaatcccgaaattcagtacacttccaactacaacaaatctgttaatgtggactttactgtggacactaatggcgtgtattcagagcctcgccccattggcaccagatacctgactcgtaatctgtaa

SEQ ID NO: 472 - protein, 735 aa, Adeno-associated virus
MAADGYLPDWLEDTLSEGIRQWWKLKPGPPPPKPAERHKDDSRGLVLPGYKYLGPFNGLDKGEPVNEADAAALEHDKAYDRQLDSGDNPYLKYNHADAEFQERLKEDTSFGGNLGRAVFQAKKRVLEPLGLVEEPVKTAPGKKRPVEHSPAEPDSSSGTGKAGQQPARKRLNFGQTGDADSVPDPQPLGQPPAAPSGLGSTTMATGSGAPMADNNEGADGVGNSSGNWHCDSQWLGDRVITTSTRTWAQPTYNNHLYKQISSQSGASNDNHYFGYSTPWGYFDFNRFHCHFSPRDWQRLINNNWGFRPKRLNFKLFNIQVKEVTQNDGTTTIANNLTSTVQVFTDSEYQLPYVLGSAHQGCLPPFPADVFMVPQYGYLTLNNGSQAVGRSSFYCLEYFPSQMLRTGNNFQFSYTFEDVPFHSSYAHSQSLDRLMNPLIDQYLYYLNKTQSNSGALQQSRLLFSQAGPTSMSLQAKNWLPGPCYRQQRLSKQANDNNNSNFPWTAATKYHLNGRDSLVNPGPAMASHKDDEEKFFPMHGTLIFGKQGTNANDADLDNVMITDEEEIRTTNPVATEQYGYVSNNLQNSNTGPTTGTVNHRGALPGMVWQDRDVYLQGPIWAKIPHTDGHFHPSPLMGGFGLKHPPPQIMIKNTPVPANPPTNFSSAKFASFITQYSTGQVSVEIEWELQKENSKRWNPEIQYTSNYNKSVNVDFTVDTNGVYSEPRPIGTRYLTRNL

SEQ ID NO: 473 - DNA, 2217 bp, Adeno-associated virus
atggctgccgatggttatcttccagattggctcgaggacaacctctctgagggcattcgcgagtggtgggcgctgaaacctggagccccgaagcccaaagccaaccagcaaaagcaggacgacggccggggtctggtgcttcctggctacaagtacctcggacccttcaacggactcgacaagggggagcccgtcaacgcggcggacgcagcggccctcgagcacgacaaggcctacgaccagcagctgcaggcgggtgacaatccgtacctgcggtataatcacgccgacgccgagtttcaggagcgtctgcaagaagatacgtcttttgggggcaacctcgggcgagcagtcttccaggccaagaagcgggttctcgaacctctcggtctggttgaggaaggcgctaagacggctcctggaaagaagagaccggtagagccgtcaccacagcgttcccccgactcctccacgggcatcggcaagaaaggccagcagcccgccagaaagagactcaatttcggtcagactggcgactcagagtcagtccccgaccctcaacctatcggagaacctccagcagcgccctctagtgtgggatctggtacaatggctgcaggcggtggcgcgccaatggcagacaataacgaaggtgccgacggagtgggtagttcctcgggaaattggcattgcgattccacatggctgggcgacagagtcatcaccaccagcacccgaacctgggccctgcccacctacaacaaccacctctacaagcaaacctccaacgggacctcgggaggcagcaccaacgacaacacctactttggctacagcaccccctgggggtattttgactttaacagattccactgccacttctcaccacgtgactggcagcgactcatcaacaacaactggggattccggcccaagagactcagcttcaagctcttcaacatccaggtcaaagaggtcacgcagaatgaaggcaccaagaccatcgccaataacctcaccagcaccatccaggtgtttacggactcggaataccagctgccgtacgtcctcggctctgcccaccagggctgcctgcctccgttcccggcggacgtcttcatgattcctcagtacggctacctgactctcaacaacggtagtcaggccgtgggacgttcctccttctactgcctggagtacttcccctctcagatgctgagaacgggcaacaacttttccttcagctacactttcgaggacgtgcctttccacagcagctacgcgcacagccagagtttggacaggctgatgaatcctctcatcgaccagtacctgtactacctgtcaagaacccagtctacgggaggcacagcgggaacccagcagttgctgttttctcaggccgggcctagcaacatgtcggctcaggccagaaactggctgcctggaccctgctacagacagcagcgcgtctccacgacactgtcgcaaaacaacaacagcaactttgcctggactggtgccaccaagtatcatctgaacggcagagactctctggtgaatccgggcgtcgccatggcaaccaacaaggacgacgaggaccgcttcttcccatccagcggcatcctcatgtttggcaagcagggagctggaaaagacaacgtggactatagcaacgtgatgctaaccagcgaggaagaaatcaagaccaccaaccccgtggccacagaacagtatggcgtggtggctgataacctacagcagcaaaacaccgctcctattgtgggggccgtcaacagccagggagccttacctggcatggtctggcagaaccgggacgtgtacctgcagggtcctatttgggccaagattcctcacacagatggcaactttcacccgtctcctttaatgggcggctttggacttaaacatccgcctcctcagatcctcatcaaaaacactcctgttcctgcggatcctccaacagcgttcaaccaggccaagctgaattctttcatcacgcagtacagcaccggacaagtcagcgcggagatcgagtgggagctgcagaaggagaacagcaagcgctggaacccagagattcagtatacttccaactactacaaatctacaaatgtggactttgctgttaatactgagggtgtttactctgagcctcgccccattggcactcgttacctcacccgtaatctgtaa

SEQ ID NO: 474 - protein, 738 aa, Adeno-associated virus
MAADGYLPDWLEDNLSEGIREWWALKPGAPKPKANQQKQDDGRGLVLPGYKYLGPFNGLDKGEPVNAADAAALEHDKAYDQQLQAGDNPYLRYNHADAEFQERLQEDTSFGGNLGRAVFQAKKRVLEPLGLVEEGAKTAPGKKRPVEPSPQRSPDSSTGIGKKGQQPARKRLNFGQTGDSESVPDPQPIGEPPAAPSSVGSGTMAAGGGAPMADNNEGADGVGSSSGNWHCDSTWLGDRVITTSTRTWALPTYNNHLYKQTSNGTSGGSTNDNTYFGYSTPWGYFDFNRFHCHFSPRDWQRLINNNWGFRPKRLSFKLFNIQVKEVTQNEGTKTIANNLTSTIQVFTDSEYQLPYVLGSAHQGCLPPFPADVFMIPQYGYLTLNNGSQAVGRSSFYCLEYFPSQMLRTGNNFSFSYTFEDVPFHSSYAHSQSLDRLMNPLIDQYLYYLSRTQSTGGTAGTQQLLFSQAGPSNMSAQARNWLPGPCYRQQRVSTTLSQNNNSNFAWTGATKYHLNGRDSLVNPGVAMATNKDDEDRFFPSSGILMFGKQGAGKDNVDYSNVMLTSEEEIKTTNPVATEQYGVVADNLQQQNTAPIVGAVNSQGALPGMVWQNRDVYLQGPIWAKIPHTDGNFHPSPLMGGFGLKHPPPQILIKNTPVPADPPTAFNQAKLNSFITQYSTGQVSAEIEWELQKENSKRWNPEIQYTSNYYKSTNVDFAVNTEGVYSEPRPIGTRYLTRNL

SEQ ID NO: 475 - DNA, 2217 bp, Adeno-associated virus
atggctgctgacggttatcttccagattggctcgaggacaacctctctgagggcattcgcgagtggtgggacctgaaacctggagcccccaagcccaaggccaaccagcagaagcaggacgacggccggggtctggtgcttcctggctacaagtacctcggacccttcaacggactcgacaagggggagcccgtcaacgcggcggacgcagcggccctcgagcacgacaaggcctacgaccagcagctcaaagcgggtgacaatccgtacctgcggtataatcacgccgacgccgagtttcaggagcgtctgcaagaagatacgtcttttgggggcaacctcgggcgagcagtcttccaggccaagaagcgggttctcgaacctctcggtctggttgaggaagctgctaagacggctcctggaaagaagagaccggtagaaccgtcacctcagcgttcccccgactcctccacgggcatcggcaagaaaggccagcagcccgctagaaagagactgaactttgggcagactggcgactcagagtcagtccccgaccctcaaccaatcggagaacctccagcagcgccctctagtgtgggatctggtacaatggccgcaggcggtggcgcaccaatggcagacaataacgaaggtgccgacggagtgggtagttcctcgggaaattggcattgcgattccacatggctgggcgacagagtcatcaccaccagcacccgaacctgggccctgcccacctacaacaaccacctctacaagcaaatctccaacgggacctcgggaggcagcaccaacgacaacacctactttggctacagcaccccctgggggtattttgactttaacagattccactgccacttctcaccacgtgactggcagcgactcatcaacaacaactggggattccggcccaagagactcagcttcaagctcttcaacatccaggtcaaagaggtcacgcagaatgaaggcaccaagaccatcgccaataacctcaccagcaccatccaggtgtttacggactcggaataccagctgccgtacgtcctcggctctgcccaccagggctgcctgcctccgttcccggcggacgtcttcatgattcctcagtacggctacctgactctcaacaacggtagtcaggccgtgggacgttcctccttctactgcctggagtacttcccctctcagatgctgagaacgggcaacaacttttccttcagctacactttcgaggacgtgcctttccacagcagctacgcgcacagccagagtttggacaggctgatgaatcctctcatcgaccagtacctgtactacctgtcaagaacccagtctacgggaggcacagcgggaacccagcagctgctgttttctcaggccgggcctagcaacatgtcggctcaggccagaaactggctgcctggaccctgctacagacagcagcgcgtctccacgacactgtcgcaaaacaacaacagcaactttgcctggactggtgccaccaagtatcatctgaacggcagagactctctggtgaatccgggcgtcgccatggcaaccaacaaggacgacgaggaccgcttcttcccatccagcggcatcctcatgtttggcaagcagggagctggaaaagacaacgtggactatagcaacgtgatgctaaccagcgaggaagaaatcaagaccaccaaccccgtggccacagaacagtatggcgtggtggctgataacctacagcagcaaaacaccgctcctattgtgggggccgtcaacagccagggagccttacctggcatggtctggcagaaccgggacgtgtacctgcagggtcctatttgggccaagattcctcacacagatggcaactttcacccgtctcctttaatgggcggctttggacttaaacatccgcctcctcagatcctcatcaaaagcactcctgttcctgcggatcctccaacagcgttcaaccaggccaagctgaattctttcatcacgcagtacagcaccggacaagtcagcgtggagatcgagtgggagctgcagaaggagaacagcaagtgctggaacccagagattcagtatacttccaactactacaaatctacaaatgtggactttgctgttaatactgagggtgtttactctgagcctcgccccattggcactcgttacctcacccgtaatctgtaa

SEQ ID NO: 476 - protein, 738 aa, Adeno-associated virus
MAADGYLPDWLEDNLSEGIREWWDLKPGAPKPKANQQKQDDGRGLVLPGYKYLGPFNGLDKGEPVNAADAAALEHDKAYDQQLKAGDNPYLRYNHADAEFQERLQEDTSFGGNLGRAVFQAKKRVLEPLGLVEEAAKTAPGKKRPVEPSPQRSPDSSTGIGKKGQQPARKRLNFGQTGDSESVPDPQPIGEPPAAPSSVGSGTMAAGGGAPMADNNEGADGVGSSSGNWHCDSTWLGDRVITTSTRTWALPTYNNHLYKQISNGTSGGSTNDNTYFGYSTPWGYFDFNRFHCHFSPRDWQRLINNNWGFRPKRLSFKLFNIQVKEVTQNEGTKTIANNLTSTIQVFTDSEYQLPYVLGSAHQGCLPPFPADVFMIPQYGYLTLNNGSQAVGRSSFYCLEYFPSQMLRTGNNFSFSYTFEDVPFHSSYAHSQSLDRLMNPLIDQYLYYLSRTQSTGGTAGTQQLLFSQAGPSNMSAQARNWLPGPCYRQQRVSTTLSQNNNSNFAWTGATKYHLNGRDSLVNPGVAMATNKDDEDRFFPSSGILMFGKQGAGKDNVDYSNVMLTSEEEIKTTNPVATEQYGVVADNLQQQNTAPIVGAVNSQGALPGMVWQNRDVYLQGPIWAKIPHTDGNFHPSPLMGGFGLKHPPPQILIKSTPVPADPPTAFNQAKLNSFITQYSTGQVSVEIEWELQKENSKCWNPEIQYTSNYYKSTNVDFAVNTEGVYSEPRPIGTRYLTRNL

SEQ ID NO: 477 - protein, 738 aa, Adeno-associated virus
MAADGYLPDWLEDNLSEGIREWWDLKPGAPKPKANQQKQDDGRGLVLPGYKYLGPFNGLDKGEPVNAADAAALEHDKAYDQQLKAGDNPYLRYNHADAEFQERLQEDTSFGGNLGRAVFQAKKRVLEPLGLVEEAAKTAPGKKRPVEPSPQRSPDSSTGIGKKGQQPARKRLNFGQTGDSESVPDPQPIGEPPAAPSSVGSGTMAAGGGAPMADNNEGADGVGSSSGNWHCDSTWLGDRVITTSTRTWALPTYNNHLYKQISNGTSGGSTNDNTYFGYSTPWGYFDFNRFHCHFSPRDWQRLINNNWGFRPKRLSFKLFNIQVKEVTQNEGTKTIANNLTSTIQVFTDSEYQLPYVLGSAHQGCLPPFPADVFMIPQYGYLTLNNGSQAVGRSSFYCLEYFPSQMLRTGNNFSFSYTFEDVPFHSSYAHSQSLDRLMNPLIDQYLYYLSRTQSTGGTAGTQQLLFSQAGPSNMSAQARNWLPGPCYRQQRVSTTLSQNNNSNFAWTGATKYHLNGRDSLVNPGVAMATNKDDEDRFFPSSGILMFGKQGAGKDNVDYSNVMLTSEEEIKTTNPVATEQYGVVADNLQQQNTAPIVGAVNSQGALPGMVWQNRDVYLQGPIWAKIPHTDGNFHPSPLMGGFGLKHPPPQILIKSTPVPADPPTAFNQAKLNSFITQYSTGQVSVEIEWELQKENSKRWNPEIQYTSNYYKSTNVDFAVNTEGVYSEPRPIGTRYLTRNL

SEQ ID NO: 478 - DNA, 2217 bp, Adeno-associated virus
atggctgctgacggttatcttccagattggctcgaggacaacctctctgagggcattcgcgagtggtgggacctgaaacctggagcccccaagcccaaggccaaccagcagaagcaggacgacggccggggtctggtgcttcctggctacaagtacctcggacccttcaacggactcgacaagggggagcccgtcaacgcggcggacgcagcggccctcgagcacgacaaggcctacgaccagcagctcaaagcgggtgacaatccgtacctgcggtataaccacgccgacgccgagtttcaggagcgtctgcaagaagatacgtcttttgggggcaacctcgggcgagcagtcttccaggccaagaagcgggttctcgaacctctcggtctggttgaggaagctgctaagacggctcctggaaagaagagaccggtagaaccgtcacctcagcgttcccccgactcctccacgggcatcggcaagaaaggccagcagcccgctagaaagagactgaactttgggcagactggcgactcagagtcagtccccgaccctcaaccaatcggagaaccaccagcaggcccctctggtctgggatctggtacaatggctgcaggcggtggcgcaccaatggctgacaataacgagggcgccgacggagtgggtaatgcctcaggaaattggcattgcgattccacatggctgggcgacagagtcatcaccaccagcacccgaacctgggctttgcccacctacaacaaccacctctacaagcaaatctccagtcagtcagcaggtagcaccaacgacaacgtctacttcggctacagcaccccctgggggtattttgacttcaacagattccactgtcacttctcaccacgtgactggcagcggctcatcaacaacaactggggattccggcccaagaagctcaacttcaagctgttcaacatccaggtcaaggaggtcacaacgaatgacggcgtcacgaccatcgccaataaccctaccagcacggttcaggtcttttcggactcggaataccagctgccctacgtcctcggctccgcacaccagggctgcctgcctccgttcccggcggacgtcttcatgattccccagtacggctacctgactctgaacaatggcagccaatcggtgggtcgttcctctttctactgcctggaatatttcccttctcaaatgctgagaacgggcaacaacttcaccttcagctacaccttcgaggacgttcccttccacagcagctacgcacacagccagagcctggaccggctgatgaatcctcttatcgaccagtacctgtattacctggccagaacacagagcaacgcaggaggcacagctggcaatcgggaactgcagttttatcagggcgggcctaccaccatggccgaacaagccaaaaactggctgcctggaccctgctacagacagcagcgcgtctccacgacactgtcgcaaaacaacaacagcaactttgcctggactggtgccaccaagtatcatctgaacggcagagactctctggtgaatccgggcgtcgccatggcaaccaacaaggacgacgaggaccgcttcttcccatccagcggcatcctcatgtttggcaagcagggagctggaaaagacaacgtggactatagcaacgtgatgctaaccagcgaggaagaaatcaagaccaccaaccccgtggccacagaacagtatggcgtggtggctgataacctacagcagcaaaacaccgctcctattgtgggggccgtcaacagccagggagccttacctggcatggtctggcagaaccgggacgtgtacctgcagggtcctatttgggccaagattcctcacacagatggcaactttcacccgtctcctttaatgggcggctttggacttaaacatccgcctcctcagatcctcatcaaaaacactcctgttcctgcggatcctccaacagcgttcaaccaggccaagctgaattctttcatcacgcagtacagcaccggacaagtcagcgtggagatcgagtgggagctgcagaaggagaacagcaagcgctggaacccagagattcagtatacttccaactactacaaatctacaaatgtggactttgctgttaatactgagggtgtttactctgagcctcgccccattggcactcgttacctcacccgtaatctgtaa

SEQ ID NO: 479 - protein, 738 aa, Adeno-associated virus
MAADGYLPDWLEDNLSEGIREWWDLKPGAPKPKANQQKQDDGRGLVLPGYKYLGPFNGLDKGEPVNAADAAALEHDKAYDQQLKAGDNPYLRYNHADAEFQERLQEDTSFGGNLGRAVFQAKKRVLEPLGLVEEAAKTAPGKKRPVEPSPQRSPDSSTGIGKKGQQPARKRLNFGQTGDSESVPDPQPIGEPPAGPSGLGSGTMAAGGGAPMADNNEGADGVGNASGNWHCDSTWLGDRVITTSTRTWALPTYNNHLYKQISSQSAGSTNDNVYFGYSTPWGYFDFNRFHCHFSPRDWQRLINNNWGFRPKKLNFKLFNIQVKEVTTNDGVTTIANNPTSTVQVFSDSEYQLPYVLGSAHQGCLPPFPADVFMIPQYGYLTLNNGSQSVGRSSFYCLEYFPSQMLRTGNNFTFSYTFEDVPFHSSYAHSQSLDRLMNPLIDQYLYYLARTQSNAGGTAGNRELQFYQGGPTTMAEQAKNWLPGPCYRQQRVSTTLSQNNNSNFAWTGATKYHLNGRDSLVNPGVAMATNKDDEDRFFPSSGILMFGKQGAGKDNVDYSNVMLTSEEEIKTTNPVATEQYGVVADNLQQQNTAPIVGAVNSQGALPGMVWQNRDVYLQGPIWAKIPHTDGNFHPSPLMGGFGLKHPPPQILIKNTPVPADPPTAFNQAKLNSFITQYSTGQVSVEIEWELQKENSKRWNPEIQYTSNYYKSTNVDFAVNTEGVYSEPRPIGTRYLTRNL

SEQ ID NO: 480 - DNA, 2208 bp, Adeno-associated virus
atggctgccgatggttatcttccagattggctcgaggacaacctctctgagggcattcacgagtggtgggacccgaaacctggagccccgaaacccaaagccaaccagcaaaagcaggacgacggccggggtctggtgcttcctggctacaagtacctcggacccttcaacggactcgacaagggggagcccgtcaacgcggcggacgcagcggccctcgagcacgacaaggcctacgaccagcagctcaaagcgggtgacaatccgtacctgcggtataatcacgccgacgccgagtttcaggagcgtctgcaagaagatacgtcttttgggggcaacctcgggcgagcagtcttccaggccaagaagcgggttctcgaacctctcggtctggttgaggaaggcgctaagacggctcctggaaagaagagaccggtagagccgtcaccacagcgttcccccgactcctccacgggcatcggcaagaaaggccagcagcccgccagaaagagactcaatttcggtcagactggcgactcagagtcagtccccgaccctcaacctatcggagaacctccagcagcgccctctagtgtgggatctggtacaatggctgcaggcggtggcgcaccaatggcagacaataacgaaggtgccgacggagtgggtagttcctcgggaaattggcattgcgattccacatggctgggcgacagagtcatcaccaccagcacccgaacctgggccctgcccacccacaacaaccacctctacaagcaaatctccaacgggacctcgggaggcagcaccaacgacaacgtctacttcggctacagcaccccctgggggtattttgacttcaacagattccactgtcacttctcaccacgtgaccggcagcgactcatcaacaacaactggggattccggcccaagagactcagcttcaagctcttcaacatccaggtcaaagaggtcacgcagaatgaaggcaccaagaccatcgccaataacctcaccagcaccatccaggtgtttacggactcggaataccagctgccgtacgtcctcggctctgcccaccagggctgcctgcctccgttcccggcggacgtcttcatgattcctcagtacggctacctgactctcaacaacggtagtcaggccgtgggacgttcctccttctactgcctggagtacttcccctctcagatgctgagaacgggcaacaacttttccttcagctacactttcgaggacgtgcctttccacagcagctacgcgcacagccagagtttggacaggctgatgaatcctctcatcgaccagtacctgtactacctgtcaagaacccagtctacggaaggcacagcgggaacccagcagttgctgttttctcaggccgggcctagcaacatgtcggctcaggccagaaactggctgcctggaccctgctacagacagcagcgcgtctccacgacactgtcgcaaaacaacaacagcaactttgcctggactggtgccaccaagtatcatctgaacggcagagactctctggtgaatccgggcgtcgccatggcaacccacaaggacgacgaggaacgcttcttcccttcgagcggagtcctgatttttggaaaaactggagcagctaataagactacactggaaaatgtgttaatgacaaatgaagaggaaattcgtcctaccaacccggtagccaccgaggaatacgggactgttagcagcaacctgcaggcggctaacactgcagcccagacacaagttgtcaacaaccagggagccttacctggtatggtctggcagaaccgggacgtgtacctgcagggtcccatctgggccaagattcctcacacggacggcaactttcacccgtctccgctgatgggcggctttggactgaagcatcctcagatcctgatcaaaaacactcctgttcctgctaatcccccggaggtgtttacgcctgccaagtttgcttctttcatcacacagtacagcaccggccaggtcagcgtggagatcgagtgggagctgcagaaggagaacagcaagcgctggaacccagagattcagtatacctccaattttgacaaacagactggtgtggactttgccgttgacagccagggtgtttattctgagcctcgccccattggtactcgttacctcacccgtaatctgtaa

SEQ ID NO: 481 - protein, 735 aa, Adeno-associated virus
MAADGYLPDWLEDNLSEGIHEWWDPKPGAPKPKANQQKQDDGRGLVLPGYKYLGPFNGLDKGEPVNAADAAALEHDKAYDQQLKAGDNPYLRYNHADAEFQERLQEDTSFGGNLGRAVFQAKKRVLEPLGLVEEGAKTAPGKKRPVEPSPQRSPDSSTGIGKKGQQPARKRLNFGQTGDSESVPDPQPIGEPPAAPSSVGSGTMAAGGGAPMADNNEGADGVGSSSGNWHCDSTWLGDRVITTSTRTWALPTHNNHLYKQISNGTSGGSTNDNVYFGYSTPWGYFDFNRFHCHFSPRDRQRLINNNWGFRPKRLSFKLFNIQVKEVTQNEGTKTIANNLTSTIQVFTDSEYQLPYVLGSAHQGCLPPFPADVFMIPQYGYLTLNNGSQAVGRSSFYCLEYFPSQMLRTGNNFSFSYTFEDVPFHSSYAHSQSLDRLMNPLIDQYLYYLSRTQSTEGTAGTQQLLFSQAGPSNMSAQARNWLPGPCYRQQRVSTTLSQNNNSNFAWTGATKYHLNGRDSLVNPGVAMATHKDDEERFFPSSGVLIFGKTGAANKTTLENVLMTNEEEIRPTNPVATEEYGTVSSNLQAANTAAQTQVVNNQGALPGMVWQNRDVYLQGPIWAKIPHTDGNFHPSPLMGGFGLKHPQILIKNTPVPANPPEVFTPAKFASFITQYSTGQVSVEIEWELQKENSKRWNPEIQYTSNFDKQTGVDFAVDSQGVYSEPRPIGTRYLTRNL

SEQ ID NO: 482 - protein, 738 aa, Adeno-associated virus
MAADGYLPDWLEDNLSEGIREWWDLKPGAPKPKANQQKQDDGRGLVLPGYKYLGPFNGLDKGEPVNAADAAALEHDKAYDQQLKAGDNPYLRYNHADAEFQERLQEDTSFGGNLGRAVFQAKKRVLEPLGLVEEGAKTAPGKKRPVEPSPQRSPDSSTGIGKKGQQPARKRLNFGQTGDSESVPDPQPIGEPPAAPSSVGSGTMAAGGGAPMADNNEGADGVGSSSGNWHCDSTWLGDRVITTSTRTWALPTYNNHLYKQISNGTSGGSTNDNTYFGYSTPWGYFDFNRFHCHFSPRDWQRPINNNWGFRPKRLSFKLFNIQVKEVTQNEGTKTIANNLTSTIQVFTDSEYQLPYVLGSAHQGCLPPFPADVFMIPQYGYLTLNNGSQAVGRSSFYCLEYFPSQMLRTGNNFSFSYPFEDVPFHSSYAHSQSLDRLMNPLIDQYLYYLSRTQSTGGTAGTQQLLFSQAGPSNMSAQARNWLPGPCYRQQRVSTTLSQNNNSNFAWTGATKYHLNGRDSLVNPGVAMATNKDDEDRFFPSSGILMFGKQGAGKDNVDYSNVMLTSEEEIKTTNPVATEQYGVVADNLQQQDTAPIVGAVNSQGALPGMVWQNRDVYLQGPIWAKIPHTDGNFHPSPLMGGFGLKHPPPQVLIKNTPVPADPPTAFNQAKLNSFITQYSTGQVSVEIEWELQKENSKRWNPEIQYTSNYYKSTNVDFAVNTEGVYSEPRPIGTRYLTRNL

SEQ ID NO: 483 - DNA, 2217 bp, Adeno-associated virus
atggctgccgatggttatcttccagattggctcgaggacaacctctctgagggcattcgcgagtggtgggacctgaaacctggagccccgaaacccaaggccaaccagcaaaagcaggacgacggccggggtctggtgcttcctggctacaagtacctcggacccttcaacggactcgacaagggggagcccgtcaacgcggcggacgcagcggccctcgagcacgacaaggcctacgaccagcagctcaaagcgggtgacaatccgtacctgcggtataatcacgccgacgccgagtttcaggagcgtctgcaagaagatacgtcttttgggggcaacctcgggcgagcagtcttccaggccaagaagcgggttctcgaacctctcggtctggttgaggaaggcgctaagacggctcctggaaagaagagaccggtagagccgtcaccacagcgttcccccgactcctccacgggcatcggcaagaaaggccagcagcccgccagaaagagactcaatttcggtcagactggcgactcagagtcagtccccgaccctcaacctatcggagaacctccagcagcgccctctagtgtgggatctggtacaatggctgcaggcggtggcgcaccaatggcagacaataacgaaggtgccgacggagtgggtagttcctcgggaaattggcattgcgattccacatggctgggcgacagagtcatcaccaccagcacccgaacctgggccctgcccacctacaacaaccacctctacaagcaaatctccaacgggacctcgggaggcagcaccaacgacaacacctactttggctacagcaccccctgggggtattttgactttaacagattccactgccacttctcaccacgtgactggcagcgacccatcaacaacaactggggattccggcccaagagactcagcttcaagctcttcaacatccaggtcaaagaggtcacgcagaatgaaggcaccaagaccatcgccaataacctcaccagcaccatccaggtgtttacggactcggaataccagctgccgtacgtcctcggctctgcccaccagggctgcctgcctccgttcccggcggacgtcttcatgattcctcagtacggctacctgactctcaacaacggtagtcaggccgtgggacgttcctccttctactgcctggagtacttcccctctcagatgctgagaacgggcaacaacttttccttcagctaccctttcgaggacgtgcctttccacagcagctacgcgcacagccagagtttggacaggctgatgaatcctctcatcgaccagtacctgtactacctgtcaagaacccagtctacgggaggcacagcgggaacccagcagttgctgttttctcaggccgggcctagcaacatgtcggctcaggccagaaactggctgcctggaccctgctacagacagcagcgcgtctccacgacactgtcgcaaaacaacaacagcaactttgcctggactggtgccaccaagtatcatctgaacggcagagactctctggtgaatccgggcgtcgccatggcaaccaacaaggacgacgaggaccgcttcttcccatccagcggcatcctcatgtttggcaagcagggagctggaaaagacaacgtggactatagcaacgtgatgctaaccagcgaggaagaaatcaagaccaccaaccccgtggccacagaacagtatggcgtggtggctgataacctacagcagcaagacaccgctcctattgtgggggccgtcaacagccagggagccttacctggcatggtctggcagaaccgggacgtgtacctgcagggtcctatttgggccaagattcctcacacagatggcaactttcacccgtctcctttaatgggcggctttggacttaaacatccgcctcctcaggtcctcatcaaaaacactcctgttcctgcggatcctccaacagcgttcaaccaggccaagctgaattctttcatcacgcagtacagcaccggacaagtcagcgtggagatcgagtgggagctgcagaaggagaacagcaagcgctggaacccagagattcagtatacttccaactactacaaatctacaaatgtggactttgctgttaatactgagggtgtttactctgagcctcgccccattggcactcgttacctcacccgtaatctgtaa

SEQ ID NO: 484 - DNA, 2214 bp, Adeno-associated virus
atggctgctgacggttatcttccagattggctcgaggacaacctctctgagggcattcgcgagtggtgggacctgaaacctggagcccccaagcccaaggccaaccagcagaagcaggacgacggccggggtctggtgcttcctggctacaagtacctcggacccttcaacggactcgacaagggggagcccgtcaacgcggcggacgcagcggccctcgagcacgacaaggcctacgaccagcagctcaaagcgggtgacaatccgtacctgcggtataaccacgccgacgccgagttccaggagcgtctgcaagaagatacgtcttttgggggcaacctcgggcgagcagtcttccaggccaagaagcgggttctcgaacctctcggtctggctgaggaagctgctaagacggctcctggaaagaagagaccggtagaaccgtcacctcagcgttcccccgactcctccacgggcatcggcaagaaaggccagcagcccgctagaaagagactgaactttgggcagactggcgactcagagtcagtccccgaccctcaaccaatcggagagccaccagcaggcccctctggtctgggatctggtacaatggctgcaggcggtggcgcaccaatggctgacaataacaagggcgccgacggagtgggtaatgcctcaggaaattggcattgcgattccacatggctgggcgacagagtcatcaccaccagcacccgaacctgggctttgcccacctacaacaaccacctctacaagcaaatctccagtcagtcagcaggtagcaccaacgacaacgtctacttcggctacagcaccccctgggggtattttgacttcaacagattccactgtcacttctcaccacgtgactggcagcggctcatcaacaacaactggggattccggcccaagaagctcaacttcaagctgttcaacatccaggtcaaggaggtcacaacgggtgacggcgtcacgaccatcgccaataaccttaccagcacggttcaggtcttttcggactcggaataccagctgccctacgtcctcggctccgcacaccagggctgcctgcctccgttcccggcggacgtcttcatgattccccagtacggctacctgactctgaacaatgacagccaatcggtgggtcgttcctctttctactgcctggaatatttcccttctcaaatgctgagaacgggcaacaacttcaccttcagctacaccttcgaggacgttcccttccacagcagctacgcacacagccagagcctggaccggctgatgaatcctcttatcgaccagtacctgtattacctggccagaacacagagcaacgcaggaggcacagctggcaatcgggaactgcagttttatcagggcgggcctaccaccatggccgaacaagccaaaaactggctgcctggaccttgcttccggcaacaaagagtctccaagacgctggatcaaaacaacaacagcaactttgcttggactggtgccaccaaataccatctaaatggaagaaattcattggttaatcccggtgtcgccatggcaacccacaaggacgacgaggaacgcttcttcccttcgagcggagtcctgatttttggaaaaactggagcagctaataagactacactggaaaatgtgttaatgacaaatgaagaggaaattcgtcctaccaacccggtagccaccgaggaatacgggactgttagcagcaacctgcaggcggctaacactgcagcccagacacaagttgtcaacaaccagggagccttacctggtatggtctggcagaaccgggacgtgtacctgcagggtcccatctgggccaagattcctcacacggacggcaactttcacccgtctccgctgatgggcggctttggactgaagcatccgcctcctcagatcctgatcaaaaacactcctgttcctgctaatcccccggaggtgtttacgcctgccaagtttgcttctttcatcacacagtacagcaccggccaggtcagcgtggagatcgagtgggagctgcagaaggagaacagcaagcgctggaacccagagattcagtatacctccaattttgacaaacagactggtgtggactttgccgttgacagccagggtgtttattctgagcctcgccccattggtactcgttacctcacccgtaatctgtaa

SEQ ID NO: 485 - protein, 737 aa, Adeno-associated virus
MAADGYLPDWLEDNLSEGIREWWDLKPGAPKPKANQQKQDDGRGLVLPGYKYLGPFNGLDKGEPVNAADAAALEHDKAYDQQLKAGDNPYLRYNHADAEFQERLQEDTSFGGNLGRAVFQAKKRVLEPLGLAEEAAKTAPGKKRPVEPSPQRSPDSSTGIGKKGQQPARKRLNFGQTGDSESVPDPQPIGEPPAGPSGLGSGTMAAGGGAPMADNNKGADGVGNASGNWHCDSTWLGDRVITTSTRTWALPTYNNHLYKQISSQSAGSTNDNVYFGYSTPWGYFDFNRFHCHFSPRDWQRLINNNWGFRPKKLNFKLFNIQVKEVTTGDGVTTIANNLTSTVQVFSDSEYQLPYVLGSAHQGCLPPFPADVFMIPQYGYLTLNNDSQSVGRSSFYCLEYFPSQMLRTGNNFTFSYTFEDVPFHSSYAHSQSLDRLMNPLIDQYLYYLARTQSNAGGTAGNRELQFYQGGPTTMAEQAKNWLPGPCFRQQRVSKTLDQNNNSNFAWTGATKYHLNGRNSLVNPGVAMATHKDDEERFFPSSGVLIFGKTGAANKTTLENVLMTNEEEIRPTNPVATEEYGTVSSNLQAANTAAQTQVVNNQGALPGMVWQNRDVYLQGPIWAKIPHTDGNFHPSPLMGGFGLKHPPPQILIKNTPVPANPPEVFTPAKFASFITQYSTGQVSVEIEWELQKENSKRWNPEIQYTSNFDKQTGVDFAVDSQGVYSEPRPIGTRYLTRNL

SEQ ID NO: 486 - DNA, 2217 bp, Adeno-associated virus
atggctgccgatggttatcttccagattggctcgaggacaacctctctgagggcattcgcgagtggtgggacctgaaacctggagccccgaaacccaaagccaaccagcaaaagcaggacgacggccggggtctggtgcttcctggctacaagtacctcggacccttcaacggactcgacaagggggagcccgtcaacgcggcggacgcagcggccctcgagcacgacaaggcctacgaccagcagctcaaagcgggtgacaatccgtacctgcggtataatcacgccgacgccgagtttcaggagcgtctgcaagaagatacgtcttttgggggcaacctcgggcgagcagtcttccaggccaagaagcgggttctcgaacctctcggtctggttgaggaaggcgctaagacggctcctggaaagaagagaccggtagagccgtcaccacagcgttcccccgactcctccacgggcatcggcaagaaaggccagcagcccgccagaaagagactcaatttcggtcagactggcgactcagagtcagtccccgaccctcaacctatcggagaacctccagcagcgccctctagtgtgggatctggtacaatggctgcaggcggtggcgcaccaatggcagacaataacgaaggtgccgacggagtgggtagttcctcgggaaattggcattgcgattccacatggctgggcgacagagtcatcaccaccagcacccgaacctgggccctgcccacctacaacaaccacctctacaagcaaatctccaacgggacctcgggaggcagcaccaacgacaacacctactttggctacagcaccccctgggggtattttgactttaacagattccactgccacttctcaccacgtgactggcagcgactcatcaacaacaactggggattccggcccaagagactcagcttcaagctcttcaacatccaggtcaaagaggtcacgcagaatgaaggcaccaagaccatcgccaataacctcaccagcaccatccaggtgtttacggactcggaataccagctgccgtacgtcctcggctctgcccaccagggctgcctgcctccgttcccggcggacgtcttcatgattcctcagtacggctacctgactctcaacaacggtagtcaggccgtgggacgttcctccttctactgcctggagtacttcccctctcagatgctgagaacgggcaacaacttttccttcagctacactttcgaggacgtgcctttccacagcagctacgcgcacagccagagtttggacaggctgatgaatcctctcatcgaccagtacctgtactacctgtcaagaacccagtctacgggaggcacagcgggaacccagcagttgctgttttctcaggccgggcctagcaacatgtcggctcaggccagaaactggctgcctggaccctgctacagacagcagcgcgtctccacgacactgtcgcaaaacaacaacagcaactttgcctggactggtgccaccaagtatcatctgaacggcagagactctctggtgaatccgggcgtcgccatggcaaccaacaaggacgacgaggaccgcttcttcccatccagcggcatcctcatgtttggcaagcagggagctggaaaagacaacgtggactatagcaacgtgatgctaaccagcgaggaagaaatcaagaccaccaaccccgtggccacagaacagtatggcgtggtggctgataacctacagcagcaaaacaccgctcctattgtgggggccgtcaacagccagggagccttacctggcatggtctggcagaaccgggacgtgtacctgcagggtcctatttgggccaagattcctcacacagatggcaactttcacccgtctcctttaatgggcggctttggacttaaacatccgcctcctcagatcctcatcaaaaacactcctgttcctgcggatcctccaacagcgttcaaccaggccaagctgaattctttcatcacgcagtacagcaccggacaagtcagcgtggagatcgtgtgggagctgcagaaggagaacagcaagcgcaggaacccagagattcagtatacttccaactactacaaatctacaaatgtggactttgctgttaatactgagggtgtttactctgagcctcgccccattggcactcgttacctcacccgtaatctgtaa

SEQ ID NO: 487 - protein, 738 aa, Adeno-associated virus
MAADGYLPDWLEDNLSEGIREWWDLKPGAPKPKANQQKQDDGRGLVLPGYKYLGPFNGLDKGEPVNAADAAALEHDKAYDQQLKAGDNPYLRYNHADAEFQERLQEDTSFGGNLGRAVFQAKKRVLEPLGLVEEGAKTAPGKKRPVEPSPQRSPDSSTGIGKKGQQPARKRLNFGQTGDSESVPDPQPIGEPPAAPSSVGSGTMAAGGGAPMADNNEGADGVGSSSGNWHCDSTWLGDRVITTSTRTWALPTYNNHLYKQISNGTSGGSTNDNTYFGYSTPWGYFDFNRFHCHFSPRDWQRLINNNWGFRPKRLSFKLFNIQVKEVTQNEGTKTIANNLTSTIQVFTDSEYQLPYVLGSAHQGCLPPFPADVFMIPQYGYLTLNNGSQAVGRSSFYCLEYFPSQMLRTGNNFSFSYTFEDVPFHSSYAHSQSLDRLMNPLIDQYLYYLSRTQSTGGTAGTQQLLFSQAGPSNMSAQARNWLPGPCYRQQRVSTTLSQNNNSNFAWTGATKYHLNGRDSLVNPGVAMATNKDDEDRFFPSSGILMFGKQGAGKDNVDYSNVMLTSEEEIKTTNPVATEQYGVVADNLQQQNTAPIVGAVNSQGALPGMVWQNRDVYLQGPIWAKIPHTDGNFHPSPLMGGFGLKHPPPQILIKNTPVPADPPTAFNQAKLNSFITQYSTGQVSVEIVWELQKENSKRRNPEIQYTSNYYKSTNVDFAVNTEGVYSEPRPIGTRYLTRNL

SEQ ID NO: 488 - protein, 738 aa, Adeno-associated virus
MAADGYLPDWLEDNLSEGIREWWDLKPGAPKPKANQQKQDDGRGLVLPGYKYLGPFNGLDKGEPVNAADAAALEHDKAYDQQLKAGDNPYLRYNHADAEFQERLQEDTSFGGNLGRAVFQAKKRVLEPLGLVEEGAKTAPGKKRPVEPSPQRSPDSSTGIGKKGQQPARKRLNFGQTGDSESVPDPQPIGEPPAAPSSVGSGTMAAGGGAPMADNNEGADGVGSSSGNWHCDSTWLGDRVITTSTRTWALPTYNNHLYKQISNGTSGGSTNDNTYFGYSTPWGYFDFNRFHCHFSPRDWQRLINNNWGFRPKRLSFKLFNIQVKEVTQNEGTKTIANNLTSTIQVFTDSEYQLPYVLGSAHQGCLPPFPADVFMIPQYGYLTLNNGSQAVGRSSFYCLEYFPSQMLRTGNNFSFSYTFEDVPFHSSYAHSQSLDRLMNPLIDQYLYYLSRTQSTGGTAGTQQLLFSQAGPSNMSAQARNWLPGPCYRQQRVSTTLSQNNNSNFAWTGATKYHLNGRDSLVNPGVAMATNKDDEDRFFPSSGILMFGKQGAGKDNVDYSNVMLTSEEEIKTTNPVATEQYGVVADNLQQQNTAPIVGAVNSQGALPGMVWQNRDVYLQGPIWAKIPHTDGNFHPSPLMGGFGLKHPPPQILIKNTPVPADPPTAFNQAKLNSFITQYSTGQVSVEIEWELQKENSKRWNPEIQYTSNYYKSTNVDFAVNTEGVYSEPRPIGTRYLTRNL

SEQ ID NO: 489 - protein, 738 aa, Adeno-associated virus
MAADGYLPDWLEDNLSEGIREWWDLKPGAPKPKANQQKQDDGRGLVLPGYKYLGPFNGLDKGEPVNAADAAALEHDKAYDQQLKAGDNPYLRYNHADAEFQERLQEDTSFGGNLGRAVFQAKKRVLEPLGLVEEGAKTAPGKKRPVEPSPQRSPDSSTGIGKKGQQPARKRLNFGQTGDSESVPDPQPIGEPPAAPSSVGSGTMAAGGGAPMADNNEGADGVGSSSGNWHCDSTWLGDRVITTSTRTWALPTYNNHLYKQISNGTSGGSTNDNTYFGYSTPWGYFDFNRFHCHFSPRDWQRLINNNWGFRPKRLSFKLFNIQVKEVTQNEGTKTIANNLTSTIQVFTDSEYQLPYVLGSAHQGCLPPFPADVFMIPQYGYLTLNNGSQAVGRSSFYCLEYFPSQMLRTGNNFSFSYTFEDVPFHSSYAHSQSLDRLMNPLIDQYLYYLSRTQSTGGTAGTQQLLFSQAGPSNMSAQARNWLPGPCYRQQRVSTTLSQNNNSNFAWTGATKYHLNGRDSLVNPGVAMATNKDDEDRFFPSSGILMFGKQGAGKDNVDYSNVMLTSEEEIKTTNPVATEQYGVVADNLQQQNTAPIVGAVNSQGALPGMVWQNRDVYLQGPIWAKIPHTDGNFHPSPLMGGFGLKHPPPQILIKNTPVPADPPTAFNQAKLNSFITQYSTGQVSVEIVWELQKENSKRWNPEIQYTSNYYKSTNVDFAVNTEGVYSEPRPIGTRYLTRNL

SEQ ID NO: 490 - protein, 738 aa, Adeno-associated virus; identical to SEQ ID NO: 488

SEQ ID NO: 491 - DNA, 2214 bp, Adeno-associated virus
atggctgctgacggttatcttccagattggctcgaggacaacctctctgagggcattcgcgagtggtgggacctgaaacctggagcccccaagcccaaggccaaccagcagaagcaggacgacggccggggtctggtgcttcctggctacaagtacctcggacccttcaacggactcgacaagggggagcccgtcaacgcggcggacgcagcggccctcgagcacgacaaggcctacgaccagcagctcaaagcgggtgacaatccgtacctgcggtataaccacgccgacgccgagtttcaggagcgtctgcaagaagatacgtcttttgggggcaacctcgggcgagcagtcttccaggccaagaagcgggttctcgaacctctcggtctggttgaggaagctgctaagacggctcctggaaagaagagaccggtagaaccgtcacctcagcgttcccccgactcctccacgggcatcggcaagaaaggccagcagcccgctagaaagagactgaactttgggcagactggcgactcagagtcagtccccgaccctcaaccaatcggagaaccaccagcaggcccctctggtctgggatctggtacaatggctgcaggcggtggcgctccaatggcagacaataacgaaggcgccgacggagtgggtaatgcctcaggaaattggcattgcgattccacatggctgggcgacagagtcatcaccaccagcacccgaacctgggctttgcccacctacaacaaccacctctacaagcaaatctccagtcagtcagcaggtagcaccaacgacaacgtctacttcggctacagcaccccctgggggtattttgacttcaacagattccactgtcacttctcaccacgtgactggcagcggctcatcaacaacaactggggattccggcccaagaagctcaacttcaagctgttcaacatccaggtcaaggaggtcacaacgaatgacggcgtcacgaccatcgccaataaccttaccagcacggttcaggtcttttcggactcggaataccagctgccctacgtcctcggctccgcacaccagggctgcctgcctccgttcccggcggacgtcttcatgattccccagtacggctacctgactctgaacaatggcagccaatcggtgggtcgttcctctttctactgcctggaatatttcccttctcaaatgctgagaacgggcaacaacttcaccttcagctacaccttcgaggacgttcccttccacagcagctacgcacacagccagagcctggaccggctgatgaatcctcttatcgaccagtacctgtattacctggccagaacacagagcaacgcaggaggcacagctggcaatcgggaactgcagttttatcagggcgggcctaccaccatggccgaacaagccaaaaactggctgcctagaccttgcttccggcaacaaagagtctccaagacgctggatcaaaacaacaacagcaactttgcttggactggtgccaccaaataccatctaaatggaagaaattcattggttaatcccggtgtcgccatggcaacccacaaggacgacgaggaacgcttcttcccttcgagcggagtcctgatttttggaaaaactggagcagctaataagactacactggaaaatgtgttaatgacaaatgaagaggaaattcgtcctaccaacccggtagccaccgaggaatacgggactgttagcagcaacctgcaggcggctaacactgcagcccagacacaagttgtcaacaaccagggagccttacctggtatggtctggcagaaccgggacgtgtacctgcagggtcccatctgggccaagattcctcacacggacggcaactttcacccgtctccgctgatgggcggctttggactgaagcatccgcctcctcagatcctgatcaaaaacactcctgttcctgctaatcccccggaggtgtttacgcctgccaagtttgcttctttcatcacacagtacagcaccggccaggtcagcgtggagatcgagtgggagctgcagaaggagaacagcaagcgctggaacccagagattcagtatacctccaattttgacaaacagactggtgtggactttgccgttgacagccagggtgtttattctgagcctcgccccattggtactcgttacctcacccgtaatctgtaa

SEQ ID NO: 492 - protein, 737 aa, Adeno-associated virus
MAADGYLPDWLEDNLSEGIREWWDLKPGAPKPKANQQKQDDGRGLVLPGYKYLGPFNGLDKGEPVNAADAAALEHDKAYDQQLKAGDNPYLRYNHADAEFQERLQEDTSFGGNLGRAVFQAKKRVLEPLGLVEEAAKTAPGKKRPVEPSPQRSPDSSTGIGKKGQQPARKRLNFGQTGDSESVPDPQPIGEPPAGPSGLGSGTMAAGGGAPMADNNEGADGVGNASGNWHCDSTWLGDRVITTSTRTWALPTYNNHLYKQISSQSAGSTNDNVYFGYSTPWGYFDFNRFHCHFSPRDWQRLINNNWGFRPKKLNFKLFNIQVKEVTTNDGVTTIANNLTSTVQVFSDSEYQLPYVLGSAHQGCLPPFPADVFMIPQYGYLTLNNGSQSVGRSSFYCLEYFPSQMLRTGNNFTFSYTFEDVPFHSSYAHSQSLDRLMNPLIDQYLYYLARTQSNAGGTAGNRELQFYQGGPTTMAEQAKNWLPRPCFRQQRVSKTLDQNNNSNFAWTGATKYHLNGRNSLVNPGVAMATHKDDEERFFPSSGVLIFGKTGAANKTTLENVLMTNEEEIRPTNPVATEEYGTVSSNLQAANTAAQTQVVNNQGALPGMVWQNRDVYLQGPIWAKIPHTDGNFHPSPLMGGFGLKHPPPQILIKNTPVPANPPEVFTPAKFASFITQYSTGQVSVEIEWELQKENSKRWNPEIQYTSNFDKQTGVDFAVDSQGVYSEPRPIGTRYLTRNL

SEQ ID NO: 493 - DNA, 2214 bp, Adeno-associated virus
atggctgctgacggttatcttccagattggctcgaggacaacctctctgagggcattcgcgagtggtgggacctgaaacctggagcccccaagcccaaggccaaccagcagaagcaggacgacggccggggtctggtgcttcctggctacaagtacctcggacccttcaacggactcgacaagggggagcccgtcaacgcggcggacgcagcggccctcgagcacgacaaggcctacgaccagcagctcaaagcgggtgacaatccgtacctgcggtataaccatgccgacgccgagtttcaggagcgtctgcaagaagatacgtcttttgggggcaacctcgggcgagcagtcctccaggccaagaagcgggttctcgaacctctcggtctggttgaggaagctgctaagacggctcctggaaagaagagaccggtagaaccgtcacctcagcgttcccccgactcctccacgggcatcggcaagaaaggccagcagcccgctagaaagagactgaactttgggcagactggcgactcagagtcagtccccgaccctcaaccaatcggagaaccaccagcaggcccctctggtctgggatctggtacaatggctgcaggcggtggcgctccaatggcagacaataacgaaggcgccgacggagtgggtaatgcctcaggaaattggcattgcgattccacatggctgggcgacagagtcatcaccaccagcacccgaacctgggctttgcccacctacaacaaccacctctacaagcaaatctccagtcagtcagcaggtagcaccaacgacaacgtctacttcggctacagcaccccctgggggtattttgacttcaacagattccactgtcacttctcaccacgtgactggcagcggctcatcaacaacaactggggattccggcccaagaagctcaacttcaagctgttcaacatccaggtcaaggaggtcacaacgaatgacggcgtcacgaccatcgccaataaccttaccagcacggttcaggtcttttcggactcggaataccagctgccctacgtcctcggctccgcacaccagggctgcctgcctccgttcccggcggacgtcttcatgattccccagtacggctacctgactctgaacaatggcagccaatcggtgggtcgttcctctttctactgcctggaatatttcccttctcaaatgctgagaacgggcaacaacttcaccttcagctacaccttcgaggacgttcccttccacagcagctacgcacacagccagagcctggaccggctgatgaatcctcttatcgaccagtacctgtattacctggccagaacacagagcaacgcaggaggcacagctggcaatcgggaactgcagttttatcagggcgggcctaccaccatggccgaacaagccaaaaactggctgcctggaccttgcttccggcaacaaagagtctccaagacgctggatcaaaacaacaacagcaactttgcttggactggtgccaccaaataccatctaaatggaagaaattcattggttaatcccggtgtcgccatggcaacccacaaggacgacgaggaacgcttcttcccttcgagcggagtcctgatttttggaaaaactggagcagctaataagactacactggaaaatgtgttaatgacaaatgaagaggaaattcgtcctaccaacccggtagccaccgaggaatacgggactgttagcagcaacctgcaggcggctaacactgcagcccagacacaagttgtcaacaaccagggagccttacctggtatggtctggcagaaccgggacgtgtacctgcagggtcccatctgggccaagattcctcacacggacggcaactttcacccgtctccgctgatgggcggctttggactgaagcatccgcctcctcagatcctgatcaaaaacactcctgttcctgctaatcccccggaggtgtttacgcctgccaagtttgcttctttcatcacacagtacagcaccggccaggtcagcgtggagatcgagtgggagctgcagaaggagaacagcaagcgctggaacccagagattcagtatacctccaattttgacaaacagactggtgtggactttgccgttgacagccagggtgtttattctgagcctcgccccattggtactcgttacctcacccgtaatctgtaa

SEQ ID NO: 494 - protein, 737 aa, Adeno-associated virus; identical to SEQ ID NO: 453

SEQ ID NO: 495 - protein, 737 aa, Adeno-associated virus
MAADGYLPDWLEDNLSEGIREWWDLKPGAPKPKANQQKQDDGRGLVLPGYKYLGPFNGLDKGEPVNAADAAALEHDKAYDQQLKAGDNPYLRYNHADAEFQERLQEDTSFGGNLGRAVLQAKKRVLEPLGLVEEAAKTAPGKKRPVEPSPQRSPDSSTGIGKKGQQPARKRLNFGQTGDSESVPDPQPIGEPPAGPSGLGSGTMAAGGGAPMADNNEGADGVGNASGNWHCDSTWLGDRVITTSTRTWALPTYNNHLYKQISSQSAGSTNDNVYFGYSTPWGYFDFNRFHCHFSPRDWQRLINNNWGFRPKKLNFKLFNIQVKEVTTNDGVTTIANNLTSTVQVFSDSEYQLPYVLGSAHQGCLPPFPADVFMIPQYGYLTLNNGSQSVGRSSFYCLEYFPSQMLRTGNNFTFSYTFEDVPFHSSYAHSQSLDRLMNPLIDQYLYYLARTQSNAGGTAGNRELQFYQGGPTTMAEQAKNWLPGPCFRQQRVSKTLDQNNNSNFAWTGATKYHLNGRNSLVNPGVAMATHKDDEERFFPSSGVLIFGKTGAANKTTLENVLMTNEEEIRPTNPVATEEYGTVSSNLQAANTAAQTQVVNNQGALPGMVWQNRDVYLQGPIWAKIPHTDGNFHPSPLMGGFGLKHPPPQILIKNTPVPANPPEVFTPAKFASFITQYSTGQVSVEIEWELQKENSKRWNPEIQYTSNFDKQTGVDFAVDSQGVYSEPRPIGTRYLTRNL

SEQ ID NO: 496 - DNA, 2217 bp, Adeno-associated virus
atggctgccgatggttatcttccagattggctcgaggacaacctctctgagggcattcgcgagtggtgggacctgaaacctggagccccgaaacccaaagccaaccagcaaaagcaggacgacggccggggtctggtgcttcctggctacaagtacctcggacccttcaacggactcgacaagggggagcccgtcaacgcggcggacgcagcggccctcgagcacgacaaggcctacgaccagcagctcaaagcgggtgacaatccgtacctgcggtataatcacgccgacgccgagtttcaggagcgtctgcaagaagatacgtcttttgggggcaacctcgggcgagcagtcttccaggccaagaagcgggttctcgaacctctcggtctggttgaggaaggcgctaagacggctcctggaaagaagagaccggtagagccgtcaccacagcgttcccccgactcctccacgggcatcggcaagaaaggccagcagcccgccagaaagagactcaatttcggtcagactggcgactcagagtcagtccccgaccctcaacctatcggagaacctccagcagcgccctctagtgtgggatctggtacaatggctgcaggcggtggcgcaccaatggcagacaataacgaaggtgccgacggagtgggtagttcctcgggaaattggcattgcgattccacatggctgggcgacagagtcatcaccaccagcacccgaacctgggccctgcccacctacaacaaccacctctacaagcaaatctccaacgggacctcgggaggcagcaccaacgacaacacctactttggctacagcaccccctgggggtattttgactttaacagattccactgccacttctcaccacgtgactggcagcgactcatcaacaacaactggggattccggcccaagagactcagcttcaagctcttcaacatccaggtcaaagaggtcacgcagaatgaaggcaccaagaccatcgccaataacctcaccagcaccatccaggtgtttacggactcggaataccagctgccgtacgtcctcggctctgcccaccagggctgcctgcctccgttcccggcggacgtcttcatgattcctcagtacggctacctgactctcaacaacggtagtcaggccgtgggacgttcctccttctactgcctggagtacttcccctctcagatgctgagaacgggcaacaacttttccttcagctacactttcgaggacgtgcctttccacagcagctacgcgcacagccagagtttggacaggctgatgaatcctctcatcgaccagtacctgtactacctgtcaagaacccagtctacgggaggcacagcgggaacccagcagttgctgttttctcaggccgggcctagcaacatgtcggctcaggccagaaactggctgcctggaccctgctacagacagcagcgcgtctccacgacactgtcgcaaaacaacaacagcaactttgcctggactggtgccaccaagtatcatctgaacggcagagactctctggtgaatccgggcgtcgccatggcaaccaacaaggacgacgaggaccgcttcttcccacccagcggcatcctcatgtttggcaagcagggagctggaaaagacaacgtggactatagcaacgtgatgctaaccagcgaggaagaaatcaagaccaccaaccccgtggccacagaacagtatggcgtggtggctgataacctacagcagcaaaacaccgctcctattgtgggggccgtcaacagccagggagccttacctggcatggtctggcagaaccgggacgtgtacctgcagggtcctatttgggccaagattcctcacacagatggcaactttcacccgtctcctttaatgggcggctttggacttaaacatccgcctcctcagatcctcatcaaaaacactcctgttcctgcggatcctccaacagcgttcaaccaggccaagctgaattctttcatcacgcagtacagcaccggacaagtcagcgtggtgatcgagtgggagctgcagaaggagaacagcaagcgctggaacccagagattcagtatacttccaactactacaaatctacaaatgtggactttgctgttaatactgagggtgtttactctgagcttcgccccattggcactcgttacctcacccgtaatctgtaa

SEQ ID NO: 497 - protein, 738 aa, Adeno-associated virus
MAADGYLPDWLEDNLSEGIREWWDLKPGAPKPKANQQKQDDGRGLVLPGYKYLGPFNGLDKGEPVNAADAAALEHDKAYDQQLKAGDNPYLRYNHADAEFQERLQEDTSFGGNLGRAVFQAKKRVLEPLGLVEEGAKTAPGKKRPVEPSPQRSPDSSTGIGKKGQQPARKRLNFGQTGDSESVPDPQPIGEPPAAPSSVGSGTMAAGGGAPMADNNEGADGVGSSSGNWHCDSTWLGDRVITTSTRTWALPTYNNHLYKQISNGTSGGSTNDNTYFGYSTPWGYFDFNRFHCHFSPRDWQRLINNNWGFRPKRLSFKLFNIQVKEVTQNEGTKTIANNLTSTIQVFTDSEYQLPYVLGSAHQGCLPPFPADVFMIPQYGYLTLNNGSQAVGRSSFYCLEYFPSQMLRTGNNFSFSYTFEDVPFHSSYAHSQSLDRLMNPLIDQYLYYLSRTQSTGGTAGTQQLLFSQAGPSNMSAQARNWLPGPCYRQQRVSTTLSQNNNSNFAWTGATKYHLNGRDSLVNPGVAMATNKDDEDRFFPPSGILMFGKQGAGKDNVDYSNVMLTSEEEIKTTNPVATEQYGVVADNLQQQNTAPIVGAVNSQGALPGMVWQNRDVYLQGPIWAKIPHTDGNFHPSPLMGGFGLKHPPPQILIKNTPVPADPPTAFNQAKLNSFITQYSTGQVSVVIEWELQKENSKRWNPEIQYTSNYYKSTNVDFAVNTEGVYSELRPIGTRYLTRNL

SEQ ID NO: 498 - DNA, 2214 bp, Adeno-associated virus
atggctgctgacggttatcttccagattggctcgaggacaacctctctgagggcattcgcgagtggtgggacctgaaacctggagcccccaagcccaaggccaaccagcagaagcaggacgacggccggggtctggtgcttcctggctacaagtacctcggacccttcaacggactcgacaagggggagcccgtcaacgcggcggacgcagcggccctcgagcacgacaaggcctacgaccagcagctcaaagcgggtgacaatccgtacctgcggtataaccacgccgacgccgagtttcaggagcgtctgcaagaagatacgtcttttgggggcaacctcgggcgagcagtcttccaggccaagaagcgggttctcgaacctctcggtctggttgaggaagctgctaagacggctcctggaaagaagagaccggtagaaccgtcacctcagcgttcccccgactcctccacgggcatcggcaagaaaggccagcagcccgctagaaagagactgaactttgggcagactggcgactcagagtcagtccccgaccctcaaccaatcggagaaccaccagcaggcccctctggtctgggatctggtacaatggctgcaggcggtggcgccccaatggcagacaataacgaaggcgccgacggagtgggtaatgcctcaggaaattggcattgcgattccacatggctgggcgacagagtcatcaccaccagcacccgaacctgggctttgcccacctacaacaaccacctctacaagcaaatctccagtcagtcagcaggtagcaccaacgacaacgtctacttcggctacagcaccccctgggggtattttgacttcaacagattccactgtcacttctcaccacgtgactggcagcggctcatcaacaacaactggggattccggcccaagaagctcaacttcaagctgttcaacatccaggtcaaggaggtcacaacgaatgacggcgtcacgaccatcgccaataaccttaccagcacggttcaggtcttttcggactcggaataccagctgccctacgtcctcggctccgcacaccagggctgcctgcctccgttcccggcggacgtcttcatgattccccagtacggctacctgactctgaacaatggcagccaatcggtgggtcgttcctctttctactgcctggaatatttcccttctcaaatgctgagaacgggcaacaacttcaccatcagctacaccttcgaggacgttcccttccacagcagctacgcacacagccagagcctggaccggctgatgaatcctcttatcgaccagtacctgtattacctggccagaacacagagcaacgcaggaggcacagctggcaatcaggaactgcagttttatcagggcgggcctaccaccatggccgaacaagccaaaaactggctgcctggaccttgcttccggcaacaaagagtctccaagacgctggatcaaaacaacaacagcaactttgcttggactggtgccaccaaataccatctaaatggaagaaattcattggttaatcccggtgtcgccatggcaacccacaaggacgacgaggaacgcttcttcccttcgagcggagtcctgatttttggaaaaactggagcagctaataagactacactggaaaatgtgttaatgacaaatgaagaggaaattcgtcctaccaacccggtagccaccgaggaatacgggactgttagcagcaacctgcaggcggctaacactgcagcccagacacaagttgtcaacaaccagggagccttacctggtatggtctggcagaaccgggacgtgtacctgcagggtcccatctgggccaagattcctcacacagatggcaactttcacccgtctcctttaatgggcggctttggacttaaacatccgcctcctcagatcctcatcaaaaacactcctgttcctgcggatcctccaacagcgttcaaccaggccaagctgaattctttcatcacgcagtacagcaccggacaagtcagcgtggagatcgagtgggagctgcagaaggagaacagcaagcgctggaacccagagattcagtatacttccaactactacaaatctacaaatgtggactttgctgttaatactgagggtgtttactctgagcctcgccccattggcactcgttacctcacccgtaatctgtaa

SEQ ID NO: 499 - protein, 737 aa, Adeno-associated virus
MAADGYLPDWLEDNLSEGIREWWDLKPGAPKPKANQQKQDDGRGLVLPGYKYLGPFNGLDKGEPVNAADAAALEHDKAYDQQLKAGDNPYLRYNHADAEFQERLQEDTSFGGNLGRAVFQAKKRVLEPLGLVEEAAKTAPGKKRPVEPSPQRSPDSSTGIGKKGQQPARKRLNFGQTGDSESVPDPQPIGEPPAGPSGLGSGTMAAGGGAPMADNNEGADGVGNASGNWHCDSTWLGDRVITTSTRTWALPTYNNHLYKQISSQSAGSTNDNVYFGYSTPWGYFDFNRFHCHFSPRDWQRLINNNWGFRPKKLNFKLFNIQVKEVTTNDGVTTIANNLTSTVQVFSDSEYQLPYVLGSAHQGCLPPFPADVFMIPQYGYLTLNNGSQSVGRSSFYCLEYFPSQMLRTGNNFTISYTFEDVPFHSSYAHSQSLDRLMNPLIDQYLYYLARTQSNAGGTAGNQELQFYQGGPTTMAEQAKNWLPGPCFRQQRVSKTLDQNNNSNFAWTGATKYHLNGRNSLVNPGVAMATHKDDEERFFPSSGVLIFGKTGAANKTTLENVLMTNEEEIRPTNPVATEEYGTVSSNLQAANTAAQTQVVNNQGALPGMVWQNRDVYLQGPIWAKIPHTDGNFHPSPLMGGFGLKHPPPQILIKNTPVPADPPTAFNQAKLNSFITQYSTGQVSVEIEWELQKENSKRWNPEIQYTSNYYKSTNVDFAVNTEGVYSEPRPIGTRYLTRNL

SEQ ID NO: 500 - DNA, 2217 bp, Adeno-associated virus
atggctgccgatggttatcttccagattggctcgaggacaacctctctgagggcattcgcgagtggtgggacctgaaacctggagccccgaaacccaaagccaaccagcaaaagcaggacgacggccggggtctggtgcttcctggctacaagtacctcggacccttcaacggactcgacaagggggagcccgtcaacgcggcggacgcagcggccctcgagcacgacaaggcctacgaccagcagctcaaagcgggtgacaatccgtacctgcggtataatcacgccgacgccgagtttcaggagcgtctgcaagaagatacgtcttttgggggcaacctcgggcgagcagtcttccaggccaagaagcgggttctcgaacctctcggtctggttgaggaaggcgctaagacggctcctggaaagaagagaccggtagagccgtcaccacagcgttcccccgactcctccacgggcatcggcaagaaaggccagcagcccgccagaaagagactcaatttcggtcagactggcgactcagagtcagtccccgaccctcaacctatcggagaacctccagcagcgccctctagtgtgggatctggtacaatggctgcaggcggtggcgcaccaatggcagacaataacgaaggtgccgacggagtgggtagttcctcgggaaattggcattgcgattccacatggctgggcgacagagtcatcaccaccagcacccgaacctgggccctgcccgcctacaacaaccacctctacaagcaaatctccaacgggacctcgggaggcagcaccaacgacaacacctactttggctacagcaccccctgggggtattttgactttaacagattccactgccacttctcaccacgtgactggcagcgactcatcaacaacaactggggattccggcccaagagactcagcttcaagctcttcaacatccaggtcaaagaggtcacgcagaatgaaggcaccaagaccatcgccaataacctcaccagcaccatccaggtgtttacggactcggaataccagctgccgtacgtcctcggctctgcccaccagggctgcctgcctccgttcccggcggatgtcttcatgattcctcagtacggctacctgactctcaacaacggtagtcaggccgtgggacgttcctccttctactgcctggagtacttcccctctcagatgctgagaacgggcaacaacttttccttcagctacactttcgaggacgtgcctttccacagcagctacgcgcacagccagagtttggacaggctgatgaatcctctcatcgaccagtacctgtactacctgtcaagaacccagtctacgggaggcacagcgggaacccagcagttgctgttttctcaggccgggcctagcaacatgtcggctcaggccagaaactggctgcctggaccctgctacagacagcagcgcgtctccacgacactgtcgcaaaacaacaacagcaactttgcctggactggtgccaccaagtatcatctgagcggcagagactctctggtgaatccgggcgtcgccatggcaaccaacaaggacgacgaggaccgcttcttcccatccagcggcatcctcatgtttggcaagcagggagctggaaaagacaacgtggactatagcaacgtgatgctaaccagcgaggaagaaatcaagaccaccaaccccgtggccacagaacagtatggcgtggtggctgataacctacagcagcaaaacaccgctcctattgtgggggccgtcaacagccagggagccttacctggcatggtctggcagaaccgggacgtgtacctgcagggtcctatttgggccaagattcctcacacagatggcaactttcacccgtctcctttaatgggcggctttggacttaaacatccgcctcctcagatcctcatcaaaaacactcctgttcctgcggatcctccaacagcgttcaaccaggccaagctgaattcttccatcacgcagtacagcaccggacaagtcagcgtggagatcgagtgggagctgcagaaggagaacagcaagcgctggaacccagagattcagtatacttccaactactacaaatctacaaatgtggactttgctgttaatactgagggtgtttactctgagcctcgccccattggcactcgttacctcacccgtaatttgtaa

SEQ ID NO: 501 - protein, 738 aa, Adeno-associated virus
MAADGYLPDWLEDNLSEGIREWWDLKPGAPKPKANQQKQDDGRGLVLPGYKYLGPFNGLDKGEPVNAADAAALEHDKAYDQQLKAGDNPYLRYNHADAEFQERLQEDTSFGGNLGRAVFQAKKRVLEPLGLVEEGAKTAPGKKRPVEPSPQRSPDSSTGIGKKGQQPARKRLNFGQTGDSESVPDPQPIGEPPAAPSSVGSGTMAAGGGAPMADNNEGADGVGSSSGNWHCDSTWLGDRVITTSTRTWALPAYNNHLYKQISNGTSGGSTNDNTYFGYSTPWGYFDFNRFHCHFSPRDWQRLINNNWGFRPKRLSFKLFNIQVKEVTQNEGTKTIANNLTSTIQVFTDSEYQLPYVLGSAHQGCLPPFPADVFMIPQYGYLTLNNGSQAVGRSSFYCLEYFPSQMLRTGNNFSFSYTFEDVPFHSSYAHSQSLDRLMNPLIDQYLYYLSRTQSTGGTAGTQQLLFSQAGPSNMSAQARNWLPGPCYRQQRVSTTLSQNNNSNFAWTGATKYHLSGRDSLVNPGVAMATNKDDEDRFFPSSGILMFGKQGAGKDNVDYSNVMLTSEEEIKTTNPVATEQYGVVADNLQQQNTAPIVGAVNSQGALPGMVWQNRDVYLQGPIWAKIPHTDGNFHPSPLMGGFGLKHPPPQILIKNTPVPADPPTAFNQAKLNSSITQYSTGQVSVEIEWELQKENSKRWNPEIQYTSNYYKSTNVDFAVNTEGVYSEPRPIGTRYLTRNL

SEQ ID NO: 502 - protein, 736 aa, Adeno-associated virus; identical to SEQ ID NO: 2

SEQ ID NO: 503 - DNA, 2217 bp, Adeno-associated virus
atggctgctgacggttatcttccagattggctcgaggacaacctctctgagggcattcgcgagtggtgggacctgaaacctggagcccccaagcccaaggccaaccagcagaagcaggacgacggccggggtctggtgcttcctggctacaagtacctcggacccttcaacggactcgacaagggggagcccgtcaacgcggcggacgcagcggccctcgagcacgacaaggcctacgaccagcagctcaaagcgggtgacaatccgtacctgcggtataaccacgccgacgccgagtttcaggagcgtctgcaagaagatacgtcttttgggggcaacctcgggcgagcagtcttccaggccaagaagcgggttctcgaacctctcggtctggttgaggaagctgctaagacggctcctggaaagaagagaccggtagaaccgtcacctcagcgttcccccgactcctccacgggcatcggcaagaaaggccagcagcccgctaaaaagagactgaactttggtcagactggcgactcagagtcagtccccgaccctcaaccaatcggagaaccaccagcaggcccctctggtctgggatctggtacaatggctgcaggcggtggcgctccaatggcagacaataacgaaggcgccgacggagtgggtagttcctcaggaaattggcattgcgattccacatggctgggcgacagagtcatcaccaccagcacccgaacctgggccctgcccacctacaacaaccacctctacaagcaaatatccaatgggacatcgggaggaagcaccaacgacaacacctacttcggctacagcaccccctgggggtattttgacttcaacagattccactgccacttctcaccacgtgactggcagcgactcatcaacaacaactggggattccggccaaaaagactcagcttcaagctcttcaacatccaggtcaaggaggtcacgcagaatgaaggcaccaagaccatcgccaataaccttaccagcacgattcaggtatttacggactcggaataccagctgccgtacgtcctcggctccgcgcaccagggctgcctgcctccgttcccggcggacgtcttcatgattccccagtacggctaccttacactgaacaatggaagtcaagccgtaggccgttcctccttctactgcctggaatattttccatctcaaatgctgcgaactggaaacaattttgaattcagctacaccttcgaggacgtgcctttccacagcagctacgcacacagccagagcttggaccgactgatgaatcctctcatcgaccagtacctgtactacttatccagaactcagtccacaggaggaactcaaggtacccagcaattgttattttctcaagctgggcctgcaaacatgtcggctcaggctaagaactggctacctggaccttgctaccggcagcagcgagtctctacgacactgtcgcaaaacaacaacagcaactttgcttggactggtgccaccaaatatcacctgaacggaagagactctttggtaaatcccggtgtcgccatggcaacccacaaggacgacgaggaacgcttcttcccgtcgagtggagtcctgatgtttggaaaacagggtgctggaagagacaatgtggactacagcagcgttatgctaaccagcgaagaagaaattaaaaccactaaccctgtagccacagaacaatacggtgtggtggctgacaacttgcagcaaaccaatacagggcctattgtgggaaatgtcaacagccaaggagccttacctggcatggtctggcagaaccgagacgtgtacctgcagggtcccatctgggccaagattcctcacacggacggcaacttccacccttcaccgctaatgggaggatttggactgaagcacccacctcctcagatcctgatcaagaacacgccggtacctgcggatcctccaacaacgttcagccaggcgaaattggcttccttcattacgcagtacagcaccggacaggtcagcgtggaaatcgagtgggagctgcagaaggagaacagcaaacgctggaacccagagattcagtacacttcaaactactacaaatctacaaatgtggactttgctgtcaatacagagggaacttattctgagcctcgccccattggtactcgttacctcacccgtaatctgtaa

SEQ ID NO: 504 - protein, 738 aa, Adeno-associated virus
MAADGYLPDWLEDNLSEGIREWWDLKPGAPKPKANQQKQDDGRGLVLPGYKYLGPFNGLDKGEPVNAADAAALEHDKAYDQQLKAGDNPYLRYNHADAEFQERLQEDTSFGGNLGRAVFQAKKRVLEPLGLVEEGAKTAPGKKRPVEPSPQRSPDSSTGIGKKGQQPARKRLNFGQTGDSESVPDPQPLGEPPAAPSSVGSGTMAAGGGAPMADNNEGADGVGSSSGNWHCDSTWLGDRVITTSTRTWALPTYNNHLYKQISNGTSGGSTNDNTYFGYSTPWGYFDFNRFHCHFSPRDWQRLINNNWGFRPKRLSFKLFNIQVKEVTQNEGTKTIANNLTSTIQVFTDSEYQLPYVLGSAHQGCLPPFPADVFMIPQYGYLTLNNGSQAVGRSSFYCLEYFPSQMLRTGNNFSFSYTFEDVPFHSSYAHSQSLDRLMNPLIDQYLYYLSRTQSTGGTAGTQQLLFSQAGPSNMSAQARNWLPGPCYRQQRVSTTLSQNNNSNFAWTGATKYHLNGRDSLVNPGVAMATNKDDEDRFFPSSGILMFGKQGAGKDNVDYSNVMLTSEEEIKTTNPVATEQYGVVADNLQRQNTAPIVGAVNSQGALPGMVWQNRDVYLQGPIWAKIPHTDGNFHPSPLMGGFGLKHPPPQILIKNTPVPADPPTAFNQAKLNSFITQYSTGQVSVEIEWELQKENSKRWNPEIQYTSNYYKSTNVDFAVNTEGVYSEPRPIGTRYLTRNL

SEQ ID NO: 505 - protein, 736 aa, Adeno-associated virus
MAADGYLPDWLEDNLSEGIREWLNLKPGAPQPKANQQKQDNARGLVLPGYKYLGPFNGLDKGDPVNEADAAALEHDKAYGQQLKAGDNPYLKYNHADAEFQERLQKDTSFGGNLGKAVFQAKKRILEPLGLVETPAKTAPGKKRPVDPSPQRSPDSSSGIGKKSPHPARKRLNFGQTGEAESVPDPQPIGEPPSDPSSVGSGTMAAGGGAPMADNNEGADGVGNSSGNWHCDSTWLGDRVITTSTRTWALPTYNNHLYKQISSQSGATNDNHYFGYSTPWGYFDFNRFHCHFSPRDWQRLINNNWGFRPKRLSFKLFNIQVKEVTQNDGTTTIANNLTSTVQVFTDSEYQLPYVLGSAHQGCLPPFPADVFMIPQYGYLTLNNGSQAVGRSSFYCLEYFPSQMLRTGNNFQFSYTFEDVPFHSSYAHSQSLDRLMNPLIDQYLYYLSKTQGTNATVQGAKLQFSQAGPSNMRDQARNWLPGPCYRQQRVSKTANDNNNSEYAWTGATKYHLNGRDSLVNPGPAMASHKDDEEKFFPMNGTLVFGKNGAGNSNVDIENVMITDEEEIRTTNPVATEQYGVVSDNLQSSNTRPITGDVDSQGVLPGMVWQDRDVYLQGPIWAKIPHTDGHFHPSPLMGGFGLKHPPPQILIKNTPVPANPATTFTPGKFASFITQYSTGQVSVQIEWELQKENSKRWNPEIQYTSNYNKSVNVDFTVDTNGVYSEPRPIGTRYLTRNL

SEQ ID NO: 506 - protein, 736 aa, Adeno-associated virus; identical to SEQ ID NO: 81

SEQ ID NO: 507 - protein, 736 aa, Adeno-associated virus
MAADGYLPDWLEDNLSEGIREWWDLKPGAPKPKANQQKQDDGRGLVLPGYKYLGPFNGLDKGEPVNAADAAALEHDKAYDQQLKAGDNPYLRYNHADAEFQERLQEDTSFGGNLGRAVFQAKKRVLEPLGLVEEGAKTAPGKKRPVEQSPQEPDSSSGIGKTGQQPAKKRLNFGQTGDSESVPDPQPLGEPPAAPSGLGPNTMASGGGAPMADNNEGADGVGNSSGNWHCDSTWLGDRVITTSTRTWALPTYNNHLYKQISNGTSGGSTNDNTYFGYSTPWGYFDFNRFHCHFSPRDWQRLINNNWGFRPKRLNFKLFNIQVKEVTTNEGTKTIANNLTSTVQVFTDSEYQLPYVLGSAHQGCLPPFPADVFMVPQYGYLTLNNGSQALGRSSFYCLEYFPSQMLRTGNNFQFSYTFEDVPFHSSYAHSQSLDRLMNPLIDQYLYYLVRTQTTGTGGTQTLAFSQAGPSSMANQARNWVPGPCYRQQRVSTTTNQNNNSNFAWTGAAKFKLNGRDSLMNPGVAMASHKDDEDRFFPSSGVLIFGKQGAGNDGVDYSQVLITDEEEIKATNPVATEEYGAVAINNQAANTQAQTGLVHNQGVIPGMVWQNRDVYLQGPIWAKIPHTDGNFHPSPLMGGFGLKHPPPQILIKNTPVPADPPLTFNQAKLNSFITQYSTGQVSVEIEWELQKENSKRWNPEIQYTSNYYKSTNVDFAVNTEGVYSEPRPIGTRYLTRNL

SEQ ID NO: 508 - protein, 736 aa, Artificial Sequence; identical to SEQ ID NO: 507
  Description of Artificial Sequence: Synthetic polypeptide

SEQ ID NO: 509 - protein, 736 aa, Artificial Sequence
  Description of Artificial Sequence: Synthetic polypeptide
MAADGYLPDWLEDNLSEGIREWWDLKPGAPKPKANQQKQDDGRGLVLPGYKYLGPFNGLDKGEPVNAADAAALEHDKAYDQQLKAGDNPYLRYNHADAEFQERLQEDTSFGGNLGRAVFQAKKRVLEPLGLVEEGAKTAPGKKRPVEQSPQEPDSSSGIGKTGQQPAKKRLNFGQTGDSESVPDPQPLGEPPAAPSGLGPNTMASGGGAPMADNNEGADGVGNSSGNWHCDSTWLGDRVITTSTRTWALPTYNNHLYKQISNGTSGGSTNDNTYFGYSTPWGYFDFNRFHCHFSPRDWQRLINNNWGFRPKRLNFKLFNIQVKEVTTNEGTKTIANNLTSTVQVFTDSEYQLPYVLGSAHQGCLPPFPADVFMVPQYGYLTLNNGSQALGRSSFYCLEYFPSQMLRTGNNFQFSYTFEDVPFHSSYAHSQSLDRLMNPLIDQYLYYLVRTQTTGTGGTQTLAFSQAGPSSMANQARNWVPGPCYRQQRVSTTTNQNNNSNFAWTGAAKFKLNGRDSLMNPGVAMASHKDDEDRFFPSSGVLIFGKQGAGNDGVDYSQVLITDEEEIKATNPVATEEYGAVAINNQRANTQAQTGLVHNQGVIPGMVWQNRDVYLQGPIWAKIPHTDGNFHPSPLMGGFGLKHPPPQILIKNTPVPADPPLTFNQAKLNSFITQYSTGQVSVEIEWELQKENSKRWNPEIQYTSNYYKSTNVDFAVNTEGVYSEPRPIGTRYLTRNL

SEQ ID NO: 510 - protein, 736 aa, Artificial Sequence
  Description of Artificial Sequence: Synthetic polypeptide
MAADGYLPDWLEDNLSEGIREWWDLKPGAPKPKANQQKQDDGRGLVLPGYKYLGPFNGLDKGEPVNAADAAALEHDKAYDQQLKAGDNPYLRYNHADAEFQERLQEDTSFGGNLGRAVFQAKKRVLEPLGLVEEGAKTAPGKKRPVEQSPQEPDSSSGIGKTGQQPAKKRLNFGQTGDSESVPDPQPLGEPPAAPSGLGPNTMASGGGAPMADNNEGADGVGNSSGNWHCDSTWLGDRVITTSTRTWALPTYNNHLYKQISNGTSGGSTNDNTYFGYSTPWGYFDFNRFHCHFSPRDWQRLINNNWGFRPKRLNFKLFNIQVKEVTTNEGTKTIANNLTSTVQVFTDSEYQLPYVLGSAHQGCLPPFPADVFMVPQYGYLTLNNGSQALGRSSFYCLEYFPSQMLRTGNNFQFSYTFEDVPFHSSYAHSQSLDRLMNPLIDQYLYYLVRTQTTGTGGTQTLAFSQAGPSSMANQARNWVPGPCYRQQRVSTTTNQNNNSNFAWTGAAKFKLNGRDSLMNPGVAMASHKDDEDAFFPSSGVLIFGKQGAGNDGVDYSQVLITDEEEIKATNPVATEEYGAVAINNQAANTQAQTGLVHNQGVIPGMVWQNRDVYLQGPIWAKIPHTDGNFHPSPLMGGFGLKHPPPQILIKNTPVPADPPLTFNQAKLNSFITQYSTGQVSVEIEWELQKENSKRWNPEIQYTSNYYKSTNVDFAVNTEGVYSEPRPIGTRYLTRNL

SEQ ID NO: 511 - DNA, 1803 bp, Bovine adeno-associated virus
acggcgcctgcggcaaaaaagaggcctctagagcagagtcctcaagagccagactcctcgagcggagttggcaagaaaggcaaacagcctgccagaaagagactcaactttgacgacgaacctggagccggagacgggcctcccccagaaggaccatcttccggagctatgtctactgagactgaaatgcgtgcagcagctggcggaaatggtggcgatgcgggacaaggtgccgagggagtgggtaatgcctccggtgattggcattgcgattccacttggtcagagagccacgtcaccaccacctcaacccgcacctgggtcctgccgacctacaacaaccacctgtacctgcggctcggctcgagcaacgccagcgacaccttcaacggattctccaccccctggggatactttgactttaaccgcttccactgccacttctcgccaagagactggcaaaggctcatcaacaaccactggggactgcgccccaaaagcatgcaagtccgcatcttcaacatccaagttaaggaggtcacgacgtctaacggggagacgaccgtatccaacaacctcaccagcacggtccagatctttgcggacagcacgtacgagctcccgtacgtgatggatgcaggtcaggagggcagcttgcctcctttccccaacgacgtgttcatggtgcctcagtacgggtactgcggactggtaaccggaggcagctctcaaaaccagacagacagaaatgccttctactgtctggagtactttcccagccagatgctgagaaccggaaacaactttgagatggtgtacaagtttgaaaacgtgcccttccactccatgtacgctcacagccagagcctggataggctgatgaacccgctgctggaccagtacctgtgggagctccagtctaccacctctggaggaactctcaaccagggcaattcagccaccaactttgccaagctgaccaaaacaaacttttctggctaccgcaaaaactggctcccggggcccatgatgaagcagcagagattctccaagactgccagtcaaaactacaagattccccagggaagaaacaacagtctgctccattatgagaccagaactaccctcgacggaagatggagcaattttgccccgggaacggccatggcaaccgcagccaacgacgccaccgacttctctcaggcccagctcatctttgcggggcccaacatcaccggcaacaccaccacagatgccaataacctgatgttcacttcagaagatgaacttagggccaccaacccccgggacactgacctgtttggccacctggcaaccaaccagcaaaacgccaccaccgttcctaccgtagacgacgtggacggagtcggcgtgtacccgggaatggtgtggcaggacagagacatttactaccaagggcccatttgggccaaaattccacacacggatggacactttcacccgtctcctctcattggcggatttggactgaaaagcccgcctccacaaatattcatcaaaaacactcctgtacccgccaatcccgcaacgaccttctctccggccagaatcaacagcttcatcacccagtacagcaccggacaggtggctgtcaaaatagaatgggaaatccagaaggagcggtccaagagatggaacccagaggtccagttcacgtccaactacggagcacaggactcgcttctctgggctcccgacaacgccggagcctacaaagagcccagggccattggatcccgatacctcaccaaccacctctag

SEQ ID NO: 512 - DNA, 1617 bp, Bovine adeno-associated virus
atgcgtgcagcagctggcggaaatggtggcgatgcgggacaaggtgccgagggagtgggtaatgcctccggtgattggcattgcgattccacttggtcagagagccacgtcaccaccacctcaacccgcacctgggtcctgccgacctacaacaaccacctgtacctgcggctcggctcgagcaacgccagcgacaccttcaacggattctccaccccctggggatactttgactttaaccgcttccactgccacttctcgccaagagactggcaaaggctcatcaacaaccactggggactgcgccccaaaagcatgcaagtccgcatcttcaacatccaagttaaggaggtcacgacgtctaacggggagacgaccgtatccaacaacctcaccagcacggtccagatctttgcggacagcacgtacgagctcccgtacgtgatggatgcaggtcaggagggcagcttgcctcctttccccaacgacgtgttcatggtgcctcagtacgggtactgcggactggtaaccggaggcagctctcaaaaccagacagacagaaatgccttctactgtctggagtactttcccagccagatgctgagaaccggaaacaactttgagatggtgtacaagtttgaaaacgtgcccttccactccatgtacgctcacagccagagcctggataggctgatgaacccgctgctggaccagtacctgtgggagctccagtctaccacctctggaggaactctcaaccagggcaattcagccaccaactttgccaagctgaccaaaacaaacttttctggctaccgcaaaaactggctcccggggcccatgatgaagcagcagagattctccaagactgccagtcaaaactacaagattccccagggaagaaacaacagtctgctccattatgagaccagaactaccctcgacggaagatggagcaattttgccccgggaacggccatggcaaccgcagccaacgacgccaccgacttctctcaggcccagctcatctttgcggggcccaacatcaccggcaacaccaccacagatgccaataacctgatgttcacttcagaagatgaacttagggccaccaacccccgggacactgacctgtttggccacctggcaaccaaccagcaaaacgccaccaccgttcctaccgtagacgacgtggacggagtcggcgtgtacccgggaatggtgtggcaggacagagacatttactaccaagggcccatttgggccaaaattccacacacggatggacactttcacccgtctcctctcattggcggatttggactgaaaagcccgcctccacaaatattcatcaaaaacactcctgtacccgccaatcccgcaacgaccttctctccggccagaatcaacagcttcatcacccagtacagcaccggacaggtggctgtcaaaatagaatgggaaatccagaaggagcggtccaagagatggaacccagaggtccagttcacgtccaactacggagcacaggactcgcttctctgggctcccgacaacgccggagcctacaaagagcccagggccattggatcccgatacctcaccaaccacctctag

SEQ ID NO: 513 - DNA, 1173 bp, Bovine adeno-associated virus
atggcgctggtaagctggctggtggaacatggcatcacttccgagaagcagtggattcaggagaatcaggagagctacctgtccttcaactccacgggaaactctcggagccagattaaagccgcgcttgacaacgcgtcaaaaattatgagtctgaccaaatctgcctcagactatctcgtgggacagactgttccagaggacatttctgaaaacagaatctggcagatttttgatctcaacggctacgacccggcatacgcgggctctgttctctacggctggtgcactcgcgcctttggaaagaggaacaccgtctggctgtatggacccgcgaccaccggaaagaccaacatcgcggaagccatctctcacaccgtgcccttttatggctgtgtgaactggactaatgagaactttccctttaatgactgtgtggaaaaaatgttgatctggtgggaggagggaaagatgaccagcaaggtggtggaacccgccaaggccatcttgggggggtctagagtacgagtggatcaaaaatgtaaatcctctgtacaagtagactctaccccggtgattatcacctccaatactaacatgtgtgtggtggtggatgggaactccacgacctttgaacaccagcagccgctggaagaccgcatgttcagatttgaactcatgcggcggctcccgccagattttggcaagattaccaagcaggaagtcaaagacttttttgcttgggcaaaggtcaaccaggtgccggtgactcacgagtttatggttcccaagaaagtggcgggaactgagagggcggagacttctagaaaacgcccactggatgacgtcaccaataccaactataaaagtccggagaagcgggcccggctctcagttgttcctgagacgcctcgcagttcagacgtgcctgtagagcccgctcctctgcgacctctcaactggtcttccaggtatgaatgcagatgtgactatcatgctaaatttgactctgtaacgggggaatgtgacgagtgtgaatatttgaatcggggcaaaaatggctgtatctttcataatgctacacattgtcaaatttgtcacgctgttcctccatgggaaaaggaaaatgtgtcagattttaatgattttgatgactgtaataaagagcagtaa

SEQ ID NO: 514 - DNA, 1833 bp, Bovine adeno-associated virus
atggctaccttctatgaagtcattgttcgcgttccatttgatgtggaagagcacctgcctggaatttctgacaactttgtagactgggtaactggtcaaatttgggagctgcctcccgagtcagatttgaatttgactctgattgagcagcctcagctgacggtggctgacagaattcgccgcgtgttcctgtacgagtggaacaaattttccaagcaggagagcaaattctttgtgcagtttgaaaagggatctgaatattttcatctgcacacgctcgtggagacctccggcatctcttctatggtccttggccgctacgtgagtcagattcgcgcccagctggtgaaggtggtgttccagaacattgagccgcggattaacgactgggtcgccatcaccaaggtaaagaagggcggagccaataaggtggtggattctgggtatattcccgcctacctgctgccgaaggtccaaccagagcttcagtgggcgtggactaacctcgaagagtataaattggccgccctcaatctggaggagcgcaaacggctcgtcgctcagtttcagcttgagtcctcgcagcgctcgcaagaggcatcttcccagagggacgtttcggctgacccggtcatcaagagcaagacttcccagaaatacatggcgctggtaagctggctggtggaacatggcatcacttccgagaagcagtggattcaggagaatcaggagagctacctgtccttcaactccacgggaaactctcggagccagattaaagccgcgcttgacaacgcgtcaaaaattatgagtctgaccaaatctgcctcagactatctcgtgggacagactgttccagaggacatttctgaaaacagaatctggcagatttttgatctcaacggctacgacccggcatacgcgggctctgttctctacggctggtgcactcgcgcctttggaaagaggaacaccgtctggctgtatggacccgcgaccaccggaaagaccaacatcgcggaagccatctctcacaccgtgcccttttatggctgtgtgaactggactaatgagaactttccctttaatgactgtgtggaaaaaatgttgatctggtgggaggagggaaagatgaccagcaaggtggtggaacccgccaaggccatcttgggggggtctagagtacgagtggatcaaaaatgtaaatcctctgtacaagtagactctaccccggtgattatcacctccaatactaacatgtgtgtggtggtggatgggaactccacgacctttgaacaccagcagccgctggaagaccgcatgttcagatttgaactcatgcggcggctcccgccagattttggcaagattaccaagcaggaagtcaaagacttttttgcttgggcaaaggtcaaccaggtgccggtgactcacgagtttatggttcccaagaaagtggcgggaactgagagggcggagacttctagaaaacgcccactggatgacgtcaccaataccaactataaaagtccggagaagcgggcccggctctcagttgttcctgagacgcctcgcagttcagacgtgcctgtagagcccgctcctctgcgacctctcaactggtcttccaggtatgaatgcagatgtgactatcatgctaaatttgactctgtaacgggggaatgtgacgagtgtgaatatttgaatcggggcaaaaatggctgtatctttcataatgctacacattgtcaaatttgtcacgctgttcctccatgggaaaaggaaaatgtgtcagattttaatgattttgatgactgtaataaagagcagtaa

SEQ ID NO: 515 - DNA, 2211 bp, Bovine adeno-associated virus
atgtcttttgttgaccaccctccagattggttggaatcgatcggcgacggctttcgtgaatttctcggccttgaggcgggtcccccgaaacccaaggccaatcaacagaagcaagataacgctcgaggtcttgtgcttcctgggtacaagtatcttggtcctgggaacggccttgataagggcgatcctgtcaattttgctgacgaggttgcccgagagcacgacctctcctaccagaaacagcttgaggcgggcgataacccttacctcaagtacaaccacgcggacgcagagtttcaggagaaactcgcttctgacacttcttttgggggaaaccttgggaaggctgttttccaggctaaaaagaggattctcgaacctcttggcctggttgagacgccggataaaacggcgcctgcggcaaaaaagaggcctctagagcagagtcctcaagagccagactcctcgagcggagttggcaagaaaggcaaacagcctgccagaaagagactcaactttgacgacgaacctggagccggagacgggcctcccccagaaggaccatcttccggagctatgtctactgagactgaaatgcgtgcagcagctggcggaaatggtggcgatgcgggacaaggtgccgagggagtgggtaatgcctccggtgattggcattgcgattccacttggtcagagagccacgtcaccaccacctcaacccgcacctgggtcctgccgacctacaacaaccacctgtacctgcggctcggctcgagcaacgccagcgacaccttcaacggattctccaccccctggggatactttgactttaaccgcttccactgccacttctcgccaagagactggcaaaggctcatcaacaaccactggggactgcgccccaaaagcatgcaagtccgcatcttcaacatccaagttaaggaggtcacgacgtctaacggggagacgaccgtatccaacaacctcaccagcacggtccagatctttgcggacagcacgtacgagctcccgtacgtgatggatgcaggtcaggagggcagcttgcctcctttccccaacgacgtgttcatggtgcctcagtacgggtactgcggactggtaaccggaggcagctctcaaaaccagacagacagaaatgccttctactgtctggagtactttcccagccagatgctgagaaccggaaacaactttgagatggtgtacaagtttgaaaacgtgcccttccactccatgtacgctcacagccagagcctggataggctgatgaacccgctgctggaccagtacctgtgggagctccagtctaccacctctggaggaactctcaaccagggcaattcagccaccaactttgccaagctgaccaaaacaaacttttctggctaccgcaaaaactggctcccggggcccatgatgaagcagcagagattctccaagactgccagtcaaaactacaagattccccagggaagaaacaacagtctgctccattatgagaccagaactaccctcgacggaagatggagcaattttgccccgggaacggccatggcaaccgcagccaacgacgccaccgacttctctcaggcccagctcatctttgcggggcccaacatcaccggcaacaccaccacagatgccaataacctgatgttcacttcagaagatgaacttagggccaccaacccccgggacactgacctgtttggccacctggcaaccaaccagcaaaacgccaccaccgttcctaccgtagacgacgtggacggagtcggcgtgtacccgggaatggtgtggcaggacagagacatttactaccaagggcccatttgggccaaaattccacacacggatggacactttcacccgtctcctctcattggcggatttggactgaaaagcccgcctccacaaatattcatcaaaaacactcctgtacccgccaatcccgcaacgaccttctctccggccagaatcaacagcttcatcacccagtacagcaccggacaggtggctgtcaaaatagaatgggaaatccagaaggagcggtccaagagatggaacccagaggtccagttcacgtccaactacggagcacaggactcgcttctctgggctcccgacaacgccggagcctacaaagagcccagggccattggatcccgatacctcaccaaccacctctag

SEQ ID NO: 516 - DNA, 4694 bp, Bovine adeno-associated virus
gtggcactcccccccctgtcgcgttcgctcgttcgctggctcgattgggggggtggcagctcaaagagctgccagacgacggccctctgggccgtcgcccccccaatcgagccagcgaacgagcgaacgcgacaggggggggagtgccacactctctagcaagggggttttgtaggtggtgatgtcattgttgatgtcattatagttgtcacgcgatagttaatgattaacagtcatgtgatgtgtgttatccaataggatgaaagcgcgcgaatgagatctcgcgagacttccggggtataaaaggggtgagtgaacgagcccgccgccattctctgctctggactgctagaggaccctcgctgccatggctaccttctatgaagtcattgttcgcgttccatttgatgtggaagagcacctgcctggaatttctgacaactttgtagactgggtaactggtcaaatttgggagctgcctcccgagtcagatttgaatttgactctgattgagcagcctcagctgacggtggctgacagaattcgccgcgtgttcctgtacgagtggaacaaattttccaagcaggagagcaaattctttgtgcagtttgaaaagggatctgaatattttcatctgcacacgctcgtggagacctccggcatctcttctatggtccttggccgctacgtgagtcagattcgcgcccagctggtgaaggtggtgttccagaacattgagccgcggattaacgactgggtcgccatcaccaaggtaaagaagggcggagccaataaggtggtggattctgggtatattcccgcctacctgctgccgaaggtccaaccagagcttcagtgggcgtggactaacctcgaagagtataaattggccgccctcaatctggaggagcgcaaacggctcgtcgctcagtttcagcttgagtcctcgcagcgctcgcaagaggcatcttcccagagggacgtttcggctgacccggtcatcaagagcaagacttcccagaaatacatggcgctggtaagctggctggtggaacatggcatcacttccgagaagcagtggattcaggagaatcaggagagctacctgtccttcaactccacgggaaactctcggagccagattaaagccgcgcttgacaacgcgtcaaaaattatgagtctgaccaaatctgcctcagactatctcgtgggacagactgttccagaggacatttctgaaaacagaatctggcagatttttgatctcaacggctacgacccggcatacgcgggctctgttctctacggctggtgcactcgcgcctttggaaagaggaacaccgtctggctgtatggacccgcgaccaccggaaagaccaacatcgcggaagccatctctcacaccgtgcccttttatggctgtgtgaactggactaatgagaactttccctttaatgactgtgtggaaaaaatgttgatctggtgggaggagggaaagatgaccagcaaggtggtggaacccgccaaggccatcttgggggggtctagagtacgagtggatcaaaaatgtaaatcctctgtacaagtagactctaccccggtgattatcacctccaatactaacatgtgtgtggtggtggatgggaactccacgacctttgaacaccagcagccgctggaagaccgcatgttcagatttgaactcatgcggcggctcccgccagattttggcaagattaccaagcaggaagtcaaagacttttttgcttgggcaaaggtcaaccaggtgccggtgactcacgagtttatggttcccaagaaagtggcgggaactgagagggcggagacttctagaaaacgcccactggatgacgtcaccaataccaactataaaagtccggagaagcgggcccggctctcagttgttcctgagacgcctcgcagttcagacgtgcctgtagagcccgctcctctgcgacctctcaactggtcttccaggtatgaatgcagatgtgactatcatgctaaatttgactctgtaacgggggaatgtgacgagtgtgaatatttgaatcggggcaaaaatggctgtatctttcataatgctacacattgtcaaatttgtcacgctgttcctccatgggaaaaggaaaatgtgtcagattttaatgattttgatgactgtaataaagagcagtaaataaagtgagtagtcatgtcttttgttgaccaccctccagattggttggaatcgatcggcgacggctttcgtgaatttctcggccttgaggcgggtcccccgaaacccaaggccaatcaacagaagcaagataacgctcgaggtcttgtgcttcctgggtacaagtatcttggtcctgggaacggccttgataagggcgatcctgtcaattttgctgacgaggttgcccgagagcacgacctctcctaccagaaacagcttgaggcgggcgataacccttacctcaagtacaaccacgcggacgcagagtttcaggagaaactcgcttctgacacttcttttgggggaaaccttgggaaggctgttttccaggctaaaaagaggattctcgaacctcttggcctggttgagacgccggataaaacggcgcctgcggcaaaaaagaggcctctagagcagagtcctcaagagccagactcctcgagcggagttggcaagaaaggcaaacagcctgccagaaagagactcaactttgacgacgaacctggagccggagacgggcctcccccagaaggaccatcttccggagctatgtctactgagactgaaatgcgtgcagcagctggcggaaatggtggcgatgcgggacaaggtgccgagggagtgggtaatgcctccggtgattggcattgcgattccacttggtcagagagccacgtcaccaccacctcaacccgcacctgggtcctgccgacctacaacaaccacctgtacctgcggctcggctcgagcaacgccagcgacaccttcaacggattctccaccccctggggatactttgactttaaccgcttccactgccacttctcgccaagagactggcaaaggctcatcaacaaccactggggactgcgccccaaaagcatgcaagtccgcatcttcaacatccaagttaaggaggtcacgacgtctaacggggagacgaccgtatccaacaacctcaccagcacggtccagatctttgcggacagcacgtacgagctcccgtacgtgatggatgcaggtcaggagggcagcttgcctcctttccccaacgacgtgttcatggtgcctcagtacgggtactgcggactggtaaccggaggcagctctcaaaaccagacagacagaaatgccttctactgtctggagtactttcccagccagatgctgagaaccggaaacaactttgagatggtgtacaagtttgaaaacgtgcccttccactccatgtacgctcacagccagagcctggataggctgatgaacccgctgctggaccagtacctgtgggagctccagtctaccacctctggaggaactctcaaccagggcaattcagccaccaactttgccaagctgaccaaaacaaacttttctggctaccgcaaaaactggctcccggggcccatgatgaagcagcagagattctccaagactgccagtcaaaactacaagattccccagggaagaaacaacagtctgctccattatgagaccagaactaccctcgacggaagatggagcaattttgccccgggaacggccatggcaaccgcagccaacgacgccaccgacttctctcaggcccagctcatctttgcggggcccaacatcaccggcaacaccaccacagatgccaataacctgatgttcacttcagaagatgaacttagggccaccaacccccgggacactgacctgtttggccacctggcaaccaaccagcaaaacgccaccaccgttcctaccgtagacgacgtggacggagtcggcgtgtacccgggaatggtgtggcaggacagagacatttactaccaagggcccatttgggccaaaattccacacacggatggacactttcacccgtctcctctcattggcggatttggactgaaaagcccgcctccacaaatattcatcaaaaacactcctgtacccgccaatcccgcaacgaccttctctccggccagaatcaacagcttcatcacccagtacagcaccggacaggtggctgtcaaaatagaatgggaaatccagaaggagcggtccaagagatggaacccagaggtccagttcacgtccaactacggagcacaggactcgcttctctgggctcccgacaacgccggagcctacaaagagcccagggccattggatcccgatacctcaccaaccacctctagcccaattctgttgcataccctcaataaaccgtgtattcgtttcagtaaaatactgcctcttgtggtcattcggcgtacaacagcttacaacaacaacaaaacccccttgctagagagtgtggcactcccccccctgtcgcgttcgctcgttcgctggctcgattgggggggtggcagctcaaagagctgccagacgacggccctctgggccgtcgcccccccaatcgagccagcgaacgagcgaacgcgacaggggggggagtgccac

SEQ ID NO: 517 - protein, 390 aa, Bovine adeno-associated virus
MALVSWLVEHGITSEKQWIQENQESYLSFNSTGNSRSQIKAALDNASKIMSLTKSASDYLVGQTVPEDISENRIWQIFDLNGYDPAYAGSVLYGWCTRAFGKRNTVWLYGPATTGKTNIAEAISHTVPFYGCVNWTNENFPFNDCVEKMLIWWEEGKMTSKVVEPAKAILGGSRVRVDQKCKSSVQVDSTPVIITSNTNMCVVVDGNSTTFEHQQPLEDRMFRFELMRRLPPDFGKITKQEVKDFFAWAKVNQVPVTHEFMVPKKVAGTERAETSRKRPLDDVTNTNYKSPEKRARLSVVPETPRSSDVPVEPAPLRPLNWSSRYECRCDYHAKFDSVTGECDECEYLNRGKNGCIFHNATHCQICHAVPPWEKENVSDFNDFDDCNKEQ

SEQ ID NO: 518 - protein, 610 aa, Bovine adeno-associated virus
MATFYEVIVRVPFDVEEHLPGISDNFVDWVTGQIWELPPESDLNLTLIEQPQLTVADRIRRVFLYEWNKFSKQESKFFVQFEKGSEYFHLHTLVETSGISSMVLGRYVSQIRAQLVKVVFQNIEPRINDWVAITKVKKGGANKVVDSGYIPAYLLPKVQPELQWAWTNLEEYKLAALNLEERKRLVAQFQLESSQRSQEASSQRDVSADPVIKSKTSQKYMALVSWLVEHGITSEKQWIQENQESYLSFNSTGNSRSQIKAALDNASKIMSLTKSASDYLVGQTVPEDISENRIWQIFDLNGYDPAYAGSVLYGWCTRAFGKRNTVWLYGPATTGKTNIAEAISHTVPFYGCVNWTNENFPFNDCVEKMLIWWEEGKMTSKVVEPAKAILGGSRVRVDQKCKSSVQVDSTPVIITSNTNMCVVVDGNSTTFEHQQPLEDRMFRFELMRRLPPDFGKITKQEVKDFFAWAKVNQVPVTHEFMVPKKVAGTERAETSRKRPLDDVTNTNYKSPEKRARLSVVPETPRSSDVPVEPAPLRPLNWSSRYECRCDYHAKFDSVTGECDECEYLNRGKNGCIFHNATHCQICHAVPPWEKENVSDFNDFDDCNKEQ

SEQ ID NO: 519 - protein, 538 aa, Artificial Sequence
  Description of Artificial Sequence: Synthetic polypeptide
MRAAAGGNGGDAGQGAEGVGNASGDWHCDSTWSESHVTTTSTRTWVLPTYNNHLYLRLGSSNASDTFNGFSTPWGYFDFNRFHCHFSPRDWQRLINNHWGLRPKSMQVRIFNIQVKEVTTSNGETTVSNNLTSTVQIFADSTYELPYVMDAGQEGSLPPFPNDVFMVPQYGYCGLVTGGSSQNQTDRNAFYCLEYFPSQMLRTGNNFEMVYKFENVPFHSMYAHSQSLDRLMNPLLDQYLWELQSTTSGGTLNQGNSATNFAKLTKTNFSGYRKNWLPGPMMKQQRFSKTASQNYKIPQGRNNSLLHYETRTTLDGRWSNFAPGTAMATAANDATDFSQAQLIFAGPNITGNTTTDANNLMFTSEDELRATNPRDTDLFGHLATNQQNATTVPTVDDVDGVGVYPGMVWQDRDIYYQGPIWAKIPHTDGHFHPSPLIGGFGLKSPPPQIFIKNTPVPANPATTFSPARINSFITQYSTGQVAVKIEWEIQKERSKRWNPEVQFTSNYGAQDSLLWAPDNAGAYKEPRAIGSRYLTNHL

SEQ ID NO: 520 - protein, 736 aa, Artificial Sequence
  Description of Artificial Sequence: Synthetic polypeptide
MSFVDHPPDWLESIGDGFREFLGLEAGPPKPKANQQKQDNARGLVLPGYKYLGPGNGLDKGDPVNFADEVAREHDLSYQKQLEAGDNPYLKYNHADAEFQEKLASDTSFGGNLGKAVFQAKKRILEPLGLVETPDKTAPAAKKRPLEQSPQEPDSSSGVGKKGKQPARKRLNFDDEPGAGDGPPPEGPSSGAMSTETEMRAAAGGNGGDAGQGAEGVGNASGDWHCDSTWSESHVTTTSTRTWVLPTYNNHLYLRLGSSNASDTFNGFSTPWGYFDFNRFHCHFSPRDWQRLINNHWGLRPKSMQVRIFNIQVKEVTTSNGETTVSNNLTSTVHIFADSTYELPYVMDAGQEGSLPPFPNDVFMVPQYGYCGLVTGGSSQNQTDRNAFYCLEYFPSQMLRTGNNFEMVYKFENVPFHSMYAHSQSLDRLMNPLLDQYLWELQSTTSGGTLNQGNSATNFAKLTNKNFSGYRKNWLPGPMMKQQRFSKTASQNYKIPQGGNNSLLHYETRTTLDRRWSNFAPGTAMATAANDATDFSQAQLIFAGPNITGNTTTDANNLMFTSEDELRATNPRDTDLFGHLATNQQNATTVPTVDDVDGVGVYPGMVWQDRDIYYQGPIWAKIPHTDGHFHPSPLIGGFGLKSPPPQIFIKNTPVPANPATTFSPARINSFITQYSTGQVAVKIEWEIQKERSKRWNPEVQFTSNYGAQDSLLWAPDNAGAYKEPRAIGSRYLTNHL

SEQ ID NO: 521 - protein, 736 aa, Artificial Sequence
  Description of Artificial Sequence: Synthetic polypeptide
MSFVDHPPDWLESIGDGFREFLGLEAGPPKPKANQQKQDNARGLVLPGYKYLGPGNGLDKGDPVNFADEVAREHDLSYQKQLEAGDNPYLKYNHADAEFQEKLASDTSFGGNLGKAVFQAKKRILEPLGLVETPDKTAPAAKKRPLEQSPQEPDSSSGVGKKGKQPARKRLNFDDEPGAGDGPPPEGPSSGAMSTETEMRAAAGGNGGDAGQGAEGVGNASGDWHCDSTWSESHVTTTSTRTWVLPTYNNHLYLRLGSSNASDTFNGFSTPWGYFDFNRFHCHFSPRDWQRLINNHWGLRPKSMQVRIFNIQVKEVTTSNGETTVSNNLTSTVQIFADSTYELPYVMDAGQEGSLPPFPNDVFMVPQYGYCGLVTGGSSQNQTDRNAFYCLEYFPSQMLRTGNNFEMVYKFENVPFHSMYAHSQSLDRLMNPLLDQYLWELQSTTSGGTLNQGNSATNFAKLTKTNFSGYRKNWLPGPMMKQQRFSKTASQNYKIPQGRNNSLLHYETRTTLDGRWSNFAPGTAMATAANDATDFSQAQLIFAGPNITGNTTTDANNLMFTSEDELRATNPRDTDLFGHLATNQQNATTVPTVDDVDGVGVYPGMVWQDRDIYYQGPIWAKIPHTDGHFHPSPLIGGFGLKSPPPQIFIKNTPVPANPATTFSPARINSFITQYSTGQVAVKIEWEIQKERSKRWNPEVQFTSNYGAQDSLLWAPDNAGAYKEPRAIGSRYLTNHL

SEQ ID NO: 522 - protein, 736 aa, Bovine adeno-associated virus; identical to SEQ ID NO: 521

SEQ ID NO: 523 - protein, 600 aa, Bovine adeno-associated virus
TAPAAKKRPLEQSPQEPDSSSGVGKKGKQPARKRLNFDDEPGAGDGPPPEGPSSGAMSTETEMRAAAGGNGGDAGQGAEGVGNASGDWHCDSTWSESHVTTTSTRTWVLPTYNNHLYLRLGSSNASDTFNGFSTPWGYFDFNRFHCHFSPRDWQRLINNHWGLRPKSMQVRIFNIQVKEVTTSNGETTVSNNLTSTVQIFADSTYELPYVMDAGQEGSLPPFPNDVFMVPQYGYCGLVTGGSSQNQTDRNAFYCLEYFPSQMLRTGNNFEMVYKFENVPFHSMYAHSQSLDRLMNPLLDQYLWELQSTTSGGTLNQGNSATNFAKLTKTNFSGYRKNWLPGPMMKQQRFSKTASQNYKIPQGRNNSLLHYETRTTLDGRWSNFAPGTAMATAANDATDFSQAQLIFAGPNITGNTTTDANNLMFTSEDELRATNPRDTDLFGHLATNQQNATTVPTVDDVDGVGVYPGMVWQDRDIYYQGPIWAKIPHTDGHFHPSPLIGGFGLKSPPPQIFIKNTPVPANPATTFSPARINSFITQYSTGQVAVKIEWEIQKERSKRWNPEVQFTSNYGAQDSLLWAPDNAGAYKEPRAIGSRYLTNHL

SEQ ID NO: 524 - DNA, 2214 bp, Artificial Sequence
  Description of Artificial Sequence: Synthetic polynucleotide
atggctgccgatggttatcttccagattggctcgaggacactctctctgaaggaataagacagtggtggaagctcaaacctggcccaccaccaccaaagcccgcagagcggcataaggacgacagcaggggtcttgtgcttcctgggtacaagtacctcggacccttcaacggactcgacaagggagagccggtcaacgaggcagacgccgcggccctcgagcacgacaaagcctacgaccggcagctcgacagcggagacaacccgtacctcaagtacaaccacgccgacgcggagtttcaggagcgccttaaagaagatacgtcttttgggggcaacctcgggcgagcagtcttccaggccaaaaagaggcttcttgaacctcttggtctggttgaggaagcggctaagacggctcctggaaagaagaggcctgtagagcagtctcctcaggaaccggactcctcctcgggcatcggcaagacaggccagcagcccgctaaaaagagactcaatttcggtcagactggcgacacagagtcagtcccagaccctcaaccaatcggagaacctcccgcagccccctcaggtgtgggatctcttacaatggcttcaggtggtggcgcaccagtggcagacaataacgaaggtgccgatggagtgggtagttcctcgggaaattggcattgcgattcccaatggctgggggacagagtcatcaccaccagcacccgaacctgggccctgcccacctacaacaatcacctctacaagcaaatctccaacgggacatcgggaggagccaccaacgacaacacctacttcggctacagcaccccctgggggtattttgactttaacagattccactgccacttttcaccacgtgactggcagcgactcatcaacaacaactggggattccggcccaagagactcagcttcaagctcttcaacatccaggtcaaggaggtcacgcagaatgaaggcaccaagaccatcgccaataaccttaccagcacggtccaggtcttcacggactcggagtaccagctgccgtacgttctcggctctgcccaccagggctgcctgcctccgttcccggcggacgtgttcatgattccccagtacggctacctaacactcaacaacggtagtcaggccgtgggacgctcctccttctactgcctggaatactttccttcgcagatgctgagaaccggcaacaacttccagtttacttacaccttcgaggacgtgcctttccacagcagctacgcccacagccagagcttggaccggctgatgaatcctctgattgaccagtacctgtactacttgtctcggactcaaacaacaggaggcacggcaaatacgcagactctgggcttcagccaaggtgggcctaatacaatggccaatcaggcaaagaactggctgccaggaccctgttaccgccaacaacgcgtctcaacgacaaccgggcaaaacaacaatagcaactttgcctggactgctgggaccaaataccatctgaatggaagaaattcattggctaatcctggcatcgctatggcaacacacaaagacgacaaggagcgtttttttcccagtaacgggatcctgatttttggcaaacaaaatgctgccagagacaatgcggattacagcgatgtcatgctcaccagcgaggaagaaatcaaaaccactaaccctgtggctacagaggaatacggtatcgtggcagataacttgcagcagcaaaacacggctcctcaaattggaactgtcaacagccagggggccttacccggtatggtttggcagaaccgggacgtgtacctgcagggtcccatctgggccaagattcctcacacggacggcaacttccacccgtctccgctgatgggcggctttggcctgaaacatcctccgcctcagatcctgatcaagaacacgcctgtacctgcggatcctccgaccaccttcaaccagtcaaagctgaactctttcatcacgcaatacagcaccggacaggtcagcgtggaaattgaatgggagctgcagaaggaaaacagcaagcgctggaaccccgagatccagtacacctccaactactacaaatctacaagtgtggactttgctgttaatacagaaggcgtgtactctgaaccccaccccattggcacccgttacctcacccgtcccctgtaa

SEQ ID NO: 525 - protein, 737 aa, Artificial Sequence
  Description of Artificial Sequence: Synthetic polypeptide
MAADGYLPDWLEDTLSEGIRQWWKLKPGPPPPKPAERHKDDSRGLVLPGYKYLGPFNGLDKGEPVNEADAAALEHDKAYDRQLDSGDNPYLKYNHADAEFQERLKEDTSFGGNLGRAVFQAKKRLLEPLGLVEEAAKTAPGKKRPVEQSPQEPDSSSGIGKTGQQPAKKRLNFGQTGDTESVPDPQPIGEPPAAPSGVGSLTMASGGGAPVADNNEGADGVGSSSGNWHCDSQWLGDRVITTSTRTWALPTYNNHLYKQISNGTSGGATNDNTYFGYSTPWGYFDFNRFHCHFSPRDWQRLINNNWGFRPKRLSFKLFNIQVKEVTQNEGTKTIANNLTSTVQVFTDSEYQLPYVLGSAHQGCLPPFPADVFMIPQYGYLTLNNGSQAVGRSSFYCLEYFPSQMLRTGNNFQFTYTFEDVPFHSSYAHSQSLDRLMNPLIDQYLYYLSRTQTTGGTANTQTLGFSQGGPNTMANQAKNWLPGPCYRQQRVSTTTGQNNNSNFAWTAGTKYHLNGRNSLANPGIAMATHKDDKERFFPSNGILIFGKQNAARDNADYSDVMLTSEEEIKTTNPVATEEYGIVADNLQQQNTAPQIGTVNSQGALPGMVWQNRDVYLQGPIWAKIPHTDGNFHPSPLMGGFGLKHPPPQILIKNTPVPADPPTTFNQSKLNSFITQYSTGQVSVEIEWELQKENSKRWNPEIQYTSNYYKSTSVDFAVNTEGVYSEPHPIGTRYLTRPL

SEQ ID NO: 526 - protein, 736 aa, Artificial Sequence
  Description of Artificial Sequence: Synthetic polypeptide
MAADGYLPDWLEDNLSEGIREWWDLKPGAPKPKANQQKQDDGRGLVLPGYKYLGPFNGLDKGEPVNAADAAALEHDKAYDQQLKAGDNPYLRYNHADAEFQERLQEDTSFGGNLGRAVFQAKKRVLEPLGLVEEGAKTAPGKKRPVEQSPQEPDSSSGIGKTGQQPAKKRLNFGQTGDTESVPDPQPIGEPPAAPSGVGSLTMASGGGAPVADNNEGADGVGSSSGNWHCDSQWLGDRVITTSTRTWALPTYNNHLYKQISSASTGASNDNHYFGYSTPWGYFDFNRFHCHFSPRDWQRLINNNWGFRPKRLNFKLFNIQVKEVTDNNGVKTIANNLTSTVQVFTDSDYQLPYVLGSAHQGCLPPFPADVFMIPQYGYLTLNNGSQAVGRSSFYCLEYFPSQMLRTGNNFQFTYTFEDVPFHSSYAHSQSLDRLMNPLIDQYLYYLSRTQTTGGTANTQTLGFSQGGPNTMANQAKNWLPGPCYRQQRVSTTTGQNNNSNFAWTAGTKYHLNGRNSLANPGIAMATHKDDKERFFPSNGILIFGKQNAARDNADYSDVMLTSEEEIKTTNPVATEEYGIVADNLQQQNTAPQIGTVNSQGALPGMVWQNRDVYLQGPIWAKIPHTDGNFHPSPLMGGFGLKHPPPQILIKNTPVPADPPTTFNQSKLNSFITQYSTGQVSVEIEWELQKENSKRWNPEIQYTSNYYKSTSVDFAVNTEGVYSEPHPIGTRYLTRPL

SEQ ID NO: 527 - protein, 736 aa, Artificial Sequence
  Description of Artificial Sequence: Synthetic polypeptide
MAADGYLPDWLEDTLSEGIRQWWKLKPGPPPPKPAERHKDDSRGLVLPGYKYLGPFNGLDKGEPVNEADAAALEHDKAYDRQLDSGDNPYLKYNHADAEFQERLQGDTSFGGNLGRAVFQAKKRVLEPLGLVEEGAKTAPGKKRPVEQSPQEPDSSSGIGETGQQPAKKRLNFGQTGDSESVPDPQPLGEPPATPAAVGPTTMASGGGAPMADNNEGADGVGSSSGNWHCDSQWLGDRVITTSTRTWALPTYNNHLYKQISSASTGASNDNHYFGYSTPWGYFDFNRFHCHFSPRDWQRLINNNWGFRPKRLSFKLFNIQVKEVTDNNGVKTIANNLTSTVQVFTDSEYQLPYVLGSAHQGCLPPFPADVFMIPQYGYLTLNNGSQAVGRSSFYCLEYFPSQMLRTGNNFTFSYTFEDVPFHSSYAHSQSLDRLMNPLIDQYLYYLSRTQTTGGTANTQTLGFSQGGPNTMANQAKNWLPGPCYRQQRVSTTTGQNNNSNFAWTAGTKYHLNGRNSLANPGIAMATHKDDKERFFPSNGILIFGKQNAARDNADYSDVMLTSEEEIKTTNPVATEEYGIVADNLQQQNTAPQIGTVNSQGALPGMVWQNRDVYLQGPIWAKIPHTDGNFHPSPLMGGFGLKHPPPQILIKNTPVPADPPTTFNQSKLNSFITQYSTGQVSVEIEWELQKENSKRWNPEIQYTSNYYKSTSVDFAVNTEGVYSEPHPIGTRYLTRPL

SEQ ID NO: 528 - DNA, 2181 bp, Artificial Sequence
  Description of Artificial Sequence: Synthetic polynucleotide
atgtcttttgttgatcaccctccagattggttggaagaagttggtgaaggtcttcgcgagtttttgggccttgaagcgggcccaccgaaaccaaaacccaatcagcagcatcaagatcaagcccgtggtcttgtgctgcctggttataactatctcggacccggaaacggtctcgatcgaggagagcctgtcaacagggcagacgaggtcgcgcgagagcacgacatctcgtacaacgagcagcttgaggcgggagacaacccctacctcaagtacaaccacgcggacgccgagtttcaggagaagctcgccgacgacacatccttcgggggaaacctcggaaaggcagtctttcaggccaagaaaagggttctcgaaccttttggcctggttgaagagggtgctaagacggcccctaccggaaagcggatagacgaccactttccaaaaagaaagaaggctcggaccgaagaggactccaagccttccacctcgtcagacgccgaagctggacccagcggatcccagcagctgcaaatcccagcacaaccagcctcaagtttgggagctgatacaatgtctgcgggaggtggcggcccattgggcgacaataaccaaggtgccgatggagtgggcaatgcctcgggagattggcattgcgattccacgtggatgggggacagagtcgtcaccaagtccacccgcacctgggtgctgcccagctacaacaaccaccagtaccgagagatcaaaagcggctccgtcgacggaagcaacgccaacgcctactttggatacagcaccccctgggggtactttgactttaaccgcttccacagccactggagcccccgagactggcaaagactcatcaacaactattggggcttcagaccccggtctctcagagtcaaaatcttcaacatccaagtcaaagaggtcacggtgcaggactccaccaccaccatcgccaacaacctcacctccaccgtccaagtgtttacggacgacgactaccaactcccgtacgtcgtcggcaacgggaccgagggatgcctgccggccttccccccgcaggtctttacgctgccgcagtacggctacgcgacgctgaaccgagacaacggagacaacccgacagagcggagcagcttcttttgcctagagtactttcccagcaagatgctgaggacgggcaacaactttgagtttacctacagctttgaagaggtgcccttccactgcagcttcgccccgagccagaacctctttaagctggccaacccgctggtggaccagtacctgtaccgcttcgtgagcacctcggccacgggcgccatccagttccaaaagaacctggcgggcagatacgccaacacctacaaaaactggttcccggggcccatgggccgaacccagggctggaacacgagctctggggtcagcagcaccaacagagtcagcgtcaacaacttttccgtctcaaaccggatgaacctggagggggccagctaccaagtgaacccccagcccaacgggatgacaaacacgctccaaggcagcaaccgctacgcgctggaaaacaccatgatcttcaacgctcaaaacgccacgccgggaactacctcggtgtacccagaggacaatctactgctgaccagcgagagcgagactcagcccgtcaaccgggtggcttacaacacgggcggtcagatggccaccaacgcccagaacgccaccacggctcccacggtcgggacctacaacctccaggaagtgcttcctggcagcgtatggatggagagggacgtgtacctccaaggacccatctgggccaagatcccagagacgggggcgcactttcacccctctccggccatgggcggattcggactcaaacacccgccgcccatgatgctcatcaaaaacacgccggtgcccggcaacatcaccagcttctcggacgtgcccgtcagcagcttcatcacccagtacagcaccgggcaggtcaccgtggagatggaatgggagctcaaaaaggaaaactccaagaggtggaacccagagatccagtacaccaacaactacaacgacccccagtttgtggactttgctccagacggctccggcgaatacagaaccaccagagccatcggaacccgatacctcacccgacccctt

SEQ ID NO: 529 - protein, 726 aa, Artificial Sequence
  Description of Artificial Sequence: Synthetic polypeptide
MSFVDHPPDWLEEVGEGLREFLGLEAGPPKPKPNQQHQDQARGLVLPGYNYLGPGNGLDRGEPVNRADEVAREHDISYNEQLEAGDNPYLKYNHADAEFQEKLADDTSFGGNLGKAVFQAKKRVLEPFGLVEEGAKTAPTGKRIDDHFPKRKKARTEEDSKPSTSSDAEAGPSGSQQLQIPAQPASSLGADTMSAGGGGPLGDNNQGADGVGNASGDWHCDSTWMGDRVVTKSTRTWVLPSYNNHQYREIKSGSVDGSNANAYFGYSTPWGYFDFNRFHSHWSPRDWQRLINNYWGFRPRSLRVKIFNIQVKEVTVQDSTTTIANNLTSTVQVFTDDDYQLPYVVGNGTEGCLPAFPPQVFTLPQYGYATLNRDNGDNPTERSSFFCLEYFPSKMLRTGNNFEFTYSFEEVPFHCSFAPSQNLFKLANPLVDQYLYRFVSTSATGAIQFQKNLAGRYANTYKNWFPGPMGRTQGWNTSSGSSTNRVSVNNFSVSNRMNLEGASYQVNPQPNGMTNTLQGSNRYALENTMIFNAQNATPGTTSVYPEDNLLLTSESETQPVNRVAYNTGGQMATNAQNATTAPTVGTYNLQEVLPGSVWMERDVYLQGPIWAKIPETGAHFHPSPAMGGFGLKHPPPMMLIKNTPVPGNITSFSDVPVSSFITQYSTGQVTVEMEWELKKENSKRWNPEIQYTNNYNDPQFVDFAPDGSGEYRTTRAIGTRYLTRPL

SEQ ID NO: 530 - protein, 735 aa, Artificial Sequence
  Description of Artificial Sequence: Synthetic polypeptide
MAADGYLPDWLEDTLSEGIRQWWKLKPGPPPPKPAERHKDDSRGLVLPGYKYLGPFNGLDKGEPVNEADAAALEHDKAYDRQLDSGDNPYLKYNHADAEFQERLKEDTSFGGNLGRAVFQAKKRILEPLGLVEEPVKTAPGKKRPVEHSPAEPDSSSGTGKSGQQPARKRLNFGQTGDADSVPDPQPLGQPPAAPSGLGTNTMASGSGAPMADNNEGADGVGNSSGNWHCDSTWMGDRVITTSTRTWALPTYNNHLYKQISSQSGASNDNHYFGYSTPWGYFDFNRFHCHFSPRDWQRLINNNWGFRPKRLSFKLFNIQVKEVTQNDGTTTIANNLTSTVQVFTDSEYQLPYVLGSAHQGCLPPFPADVFMVPQYGYLTLNNGSQAVGRSSFYCLEYFPSQMLRTGNNFTFSYTFEDVPFHSSYAHSQSLDRLMNPLIDQYLYYLSRTNTPSGTTTMSRLQFSQAGASDIRDQSRNWLPGPCYRQQRVSKTAADNNNSDYSWTGATKYHLNGRDSLVNPGPAMASHKDDEEKYFPQSGVLIFGKQDSGKTNVDIEKVMITDEEEIRTTNPVATEQYGSVSTNLQSGNTQAATSDVNTQGVLPGMVWQDRDVYLQGPIWAKIPHTDGHFHPSPLMGGFGLKHPPPQILIKNTPVPANPSTTFSAAKFASFITQYSTGQVSVEIEWELQKENSKRWNPEIQYTSNYNKSVNVDFTVDTNGVYSEPRPIGTRYLTRNL

SEQ ID NO: 531 - DNA, 1797 bp, Artificial Sequence
  Description of Artificial Sequence: Synthetic polynucleotide
acggctccgaccggagacaagcggaaaggcgaagacgaacctcgtttgcccgacacttcttcacagactcccaagaaaaacaagaagcctcgcaaggaaagaccttccggcggggcagaagatccgggcgaaggcacctcttccaacgctggagcagcagcacccgcctctagtgtgggatcatctatcatggctgaaggaggtggcggcccagtgggcgatgcaggccagggtgccgatggagtgggcaattcctccggaaattggcattgcgattcccaatggctggaaaacggagtcgtcactcgaaccacccgaacctgggtcttgcccagctacaacaaccacctgtacaaacgaatccaaggacccagcggaggcgacaacaacaacaaattctttggattcagcaccccctggggatactttgactacaatcgattccactgccacttttccccgcgagactggcaacgactcatcaacaacaactggggcatccgtcccaaagcgatgcgctttagactctttaacatccaggttaaagaggtcacggtccaagacttcaacaccaccatcggcaacaacctcaccagtacggtccaggtctttgcggacaaggactaccaactgccgtacgtcctcggatcggctaccgaaggcaccttcccgccgttcccagcggatatctacacgatcccgcagtacgggtactgcacgctaaactacaacaacgaggcggtggatcgttcggccttctactgtctggactactttccctcagacatgctgcggacaggaaataactttgagtttacttacaccttcgaggacgttcctttccatagcatgtttgcccacaaccagacgctagaccggctgatgaatcccctcgtggatcagtacctctgggctttcagctccgtcagccaagcaggctcatctggacgagctcttcattactcgcgggcgactaaaaccaacatggcggctcaatataggaactggttacctgggcctttcttccgtgatcagcaaatctttacgggcgctagcaacatcactaaaaataacgtctttagcgtttgggaaaaaggcaagcaatgggaactcgacaatcggaccaacctaatgcagcccggtcctgcggcagcgaccacctttagcggagaacctgaccgtcaagccatgcaaaacacgctggcttttagcaggaccgtctacgatcaaacgaccgccacgaccgatcgtaaccagatactcatcaccaacgaagacgaaatcagacccaccaactcggtcggtatcgacgcgtggggagcagttcccaccaacaaccagtcgatcgtgacccccggcactcgcgcggccgtcaacaatcaaggggcgcttcccgggatggtgtggcaaaacagagacatttaccctacagggacccatttggccaaaattcccgacactgacaatcacttccatccgtccccgcttattgggcggtttggctgcaagcatccccctccccagattttcattaaaaacacacccgtccctgccaacccttcggaaacgttccagacggccaaagtggcctccttcatcaaccagtactcgaccggacagtgcaccgtcgaaatcttttgggaactcaagaaggaaacctccaagcgctggaaccccgaaatccagttcacctccaactttggcaacgcggccgacatccagtttgccgtctccgacacgggatcctattccgaacctcgtcccatcggtacccgttaccttaccaaacctctgtaa

SEQ ID NO: 532 - DNA, 1989 bp, Artificial Sequence
  Description of Artificial Sequence: Synthetic polynucleotide
atgaggtcgtactacgaggtcatcgttcagctgcccaacgacgtcgagagtcaggtacctggaatctccgattcgttcgtcaactggattacgtcgcgagaatggacgttgcctgaggacgccgattgggatttggaccaggtcgatcaagttcaactgacgctcggcgacaaaatccaacgggagattcgaactcattgggggacgatggccaaagaaccggactttcactattttatccaactggaacaaggtgaggtgttctttcatttacacgtcctgctggaaacgtgttccgtaaagccgatggtactcggaagatatatccgacatattcaacaaaaaattgtgagtaaagtctactgcgccacgagcctacgatggaaggatggatgcgtggtgaccaagaccaaaaatttcgggggcgcgaacaaggtccgggccgagtcgtatattcccgcctacctgatcccgaaacagcaaccggaagtgcagtgggcgtggactaacgtgcccgagtatataaaagcgtgcttgcaccgagaactgcgtgccagtctcgcgcgacttcacttcgaggaggcgggcgtctcgcaatccaaggaaaatctcgcgagaactgcagacggcgctcccgtgatgccgacccgcgtcagcaaacgctacatggagctcgtggattggctcgtggagaaggggatcaccaccgagaaggaatggctgctggaaaacagagaaagctttcggagctttcaggcctcgagcaactcggcgcgtcagatcaagacggccctgcaaggcgccattcaggagatgcttctgaccaagacggcggaggactacctcgtcggaaaggatcccgtctcggacgacgacatccgtcagaaccgcatctacaagattctggaactgaaccactacgacccagcgtacgtggggagtattttggtcgggtggtgccagaagaaatggggcaagcgaaacacgctgtggctgttcggacatgcgaccaccggcaagaccaacatcgcggaggctattgcccatgctgtgccgttctatggatgcgttaactggaccaacgagaactttccgttcaacgactgcgtcgaaaaaatgattatctggtgggaggagggcaaaatgaccgccaaagtggtggaaacagccaaggcgattctgggaggatctcgggtgagagtggaccaaaaatgcaaagcttcggttccgatcgaaccgacgccggtcattattaccagtaacaccaacatgtgttatgtcatcgacgggaacacgaccacgttcgagcataagcagccgttggaggacaggatgtttaagctcgaattgctgactcggttgcctgatgactttggtaaggtgaccaaacaggaggtgcgtcaattcttcaggtggtctcaggatcacctgacccctgtgatcccagaattcctagtgcggaaggcggagtctcgcaaaagacccgccccttccggggaaggctatataagcccgacaaagcggcccgcgctcgcagagcagcagcaggcgtcggagagcgcggacccggttcccaccaggtatcgtatcaaatgctcgaaacattgcggtatggataaaatgttgtttccttgccaaatttgtgaatcgatgaacagagatattaatatttgtgctattcataaaacgaccgactgtaaagagtgtttccccgactacggggataaagatgatgtagaactacccccctgtacagaacacaacgtgtctcgttgttatcaatgtcattcgggcgaattgtatcgcgtgacttcggactctgacgagaaacctgcccccgagagtgatgaaggcaccgagccatcctatgctccctgcacgattcaccacctgatgggcaagagtcacgggttagtcacttgcgcggcgtgtcggttgaaaaatagtacgttgcatgatgacttggatgacggtgatctcgaacaataa

SEQ ID NO: 533 - DNA, 1626 bp, Artificial Sequence
  Description of Artificial Sequence: Synthetic polynucleotide
atgaggtcgtactacgaggtcatcgttcagctgcccaacgacgtcgagagtcaggtacctggaatctccgattcgttcgtcaactggattacgtcgcgagaatggacgttgcctgaggacgccgattgggatttggaccaggtcgatcaagttcaactgacgctcggcgacaaaatccaacgggagattcgaactcattgggggacgatggccaaagaaccggactttcactattttatccaactggaacaaggtgaggtgttctttcatttacacgtcctgctggaaacgtgttccgtaaagccgatggtactcggaagatatatccgacatattcaacaaaaaattgtgagtaaagtctactgcgccacgagcctacgatggaaggatggatgcgtggtgaccaagaccaaaaatttcgggggcgcgaacaaggtccgggccgagtcgtatattcccgcctacctgatcccgaaacagcaaccggaagtgcagtgggcgtggactaacgtgcccgagtatataaaagcgtgcttgcaccgagaactgcgtgccagtctcgcgcgacttcacttcgaggaggcgggcgtctcgcaatccaaggaaaatctcgcgagaactgcagacggcgctcccgtgatgccgacccgcgtcagcaaacgctacatggagctcgtggattggctcgtggagaaggggatcaccaccgagaaggaatggctgctggaaaacagagaaagctttcggagctttcaggcctcgagcaactcggcgcgtcagatcaagacggccctgcaaggcgccattcaggagatgcttctgaccaagacggcggaggactacctcgtcggaaaggatcccgtctcggacgacgacatccgtcagaaccgcatctacaagattctggaactgaaccactacgacccagcgtacgtggggagtattttggtcgggtggtgccagaagaaatggggcaagcgaaacacgctgtggctgttcggacatgcgaccaccggcaagaccaacatcgcggaggctattgcccatgctgtgccgttctatggatgcgttaactggaccaacgagaactttccgttcaacgactgcgtcgaaaaaatgattatctggtgggaggagggcaaaatgaccgccaaagtggtggaaacagccaaggcgattctgggaggatctcgggtgagagtggaccaaaaatgcaaagcttcggttccgatcgaaccgacgccggtcattattaccagtaacaccaacatgtgttatgtcatcgacgggaacacgaccacgttcgagcataagcagccgttggaggacaggatgtttaagctcgaattgctgactcggttgcctgatgactttggtaaggtgaccaaacaggaggtgcgtcaattcttcaggtggtctcaggatcacctgacccctgtgatcccagaattcctagtgcggaaggcggagtctcgcaaaagacccgccccttccggggaaggctatataagcccgacaaagcggcccgcgctcgcagagcagcagcaggcgtcggagagcgcggacccggttcccaccagattggttggagcggttggtcaaaaagggagtgaatgctgcagctga

SEQ ID NO: 534 - DNA, 1323 bp, Artificial Sequence
  Description of Artificial Sequence: Synthetic polynucleotide
atggagctcgtggattggctcgtggagaaggggatcaccaccgagaaggaatggctgctggaaaacagagaaagctttcggagctttcaggcctcgagcaactcggcgcgtcagatcaagacggccctgcaaggcgccattcaggagatgcttctgaccaagacggcggaggactacctcgtcggaaaggatcccgtctcggacgacgacatccgtcagaaccgcatctacaagattctggaactgaaccactacgacccagcgtacgtggggagtattttggtcgggtggtgccagaagaaatggggcaagcgaaacacgctgtggctgttcggacatgcgaccaccggcaagaccaacatcgcggaggctattgcccatgctgtgccgttctatggatgcgttaactggaccaacgagaactttccgttcaacgactgcgtcgaaaaaatgattatctggtgggaggagggcaaaatgaccgccaaagtggtggaaacagccaaggcgattctgggaggatctcgggtgagagtggaccaaaaatgcaaagcttcggttccgatcgaaccgacgccggtcattattaccagtaacaccaacatgtgttatgtcatcgacgggaacacgaccacgttcgagcataagcagccgttggaggacaggatgtttaagctcgaattgctgactcggttgcctgatgactttggtaaggtgaccaaacaggaggtgcgtcaattcttcaggtggtctcaggatcacctgacccctgtgatcccagaattcctagtgcggaaggcggagtctcgcaaaagacccgccccttccggggaaggctatataagcccgacaaagcggcccgcgctcgcagagcagcagcaggcgtcggagagcgcggacccggttcccaccaggtatcgtatcaaatgctcgaaacattgcggtatggataaaatgttgtttccttgccaaatttgtgaatcgatgaacagagatattaatatttgtgctattcataaaacgaccgactgtaaagagtgtttccccgactacggggataaagatgatgtagaactacccccctgtacagaacacaacgtgtctcgttgttatcaatgtcattcgggcgaattgtatcgcgtgacttcggactctgacgagaaacctgcccccgagagtgatgaaggcaccgagccatcctatgctccctgcacgattcaccacctgatgggcaagagtcacgggttagtcacttgcgcggcgtgtcggttgaaaaatagtacgttgcatgatgacttggatgacggtgatctcgaacaataa

SEQ ID NO: 535 - DNA, 960 bp, Artificial Sequence
  Description of Artificial Sequence: Synthetic polynucleotide
atggagctcgtggattggctcgtggagaaggggatcaccaccgagaaggaatggctgctggaaaacagagaaagctttcggagctttcaggcctcgagcaactcggcgcgtcagatcaagacggccctgcaaggcgccattcaggagatgcttctgaccaagacggcggaggactacctcgtcggaaaggatcccgtctcggacgacgacatccgtcagaaccgcatctacaagattctggaactgaaccactacgacccagcgtacgtggggagtattttggtcgggtggtgccagaagaaatggggcaagcgaaacacgctgtggctgttcggacatgcgaccaccggcaagaccaacatcgcggaggctattgcccatgctgtgccgttctatggatgcgttaactggaccaacgagaactttccgttcaacgactgcgtcgaaaaaatgattatctggtgggaggagggcaaaatgaccgccaaagtggtggaaacagccaaggcgattctgggaggatctcgggtgagagtggaccaaaaatgcaaagcttcggttccgatcgaaccgacgccggtcattattaccagtaacaccaacatgtgttatgtcatcgacgggaacacgaccacgttcgagcataagcagccgttggaggacaggatgtttaagctcgaattgctgactcggttgcctgatgactttggtaaggtgaccaaacaggaggtgcgtcaattcttcaggtggtctcaggatcacctgacccctgtgatcccagaattcctagtgcggaaggcggagtctcgcaaaagacccgccccttccggggaaggctatataagcccgacaaagcggcccgcgctcgcagagcagcagcaggcgtcggagagcgcggacccggttcccaccagattggttggagcggttggtcaaaaagggagtgaatgctgcagctga

SEQ ID NO: 536 - DNA, 1608 bp, Artificial Sequence
  Description of Artificial Sequence: Synthetic polynucleotide
atggctgaaggaggtggcggcccagtgggcgatgcaggccagggtgccgatggagtgggcaattcctccggaaattggcattgcgattcccaatggctggaaaacggagtcgtcactcgaaccacccgaacctgggtcttgcccagctacaacaaccacctgtacaaacgaatccaaggacccagcggaggcgacaacaacaacaaattctttggattcagcaccccctggggatactttgactacaatcgattccactgccacttttccccgcgagactggcaacgactcatcaacaacaactggggcatccgtcccaaagcgatgcgctttagactctttaacatccaggttaaagaggtcacggtccaagacttcaacaccaccatcggcaacaacctcaccagtacggtccaggtctttgcggacaaggactaccaactgccgtacgtcctcggatcggctaccgaaggcaccttcccgccgttcccagcggatatctacacgatcccgcagtacgggtactgcacgctaaactacaacaacgaggcggtggatcgttcggccttctactgtctggactactttccctcagacatgctgcggacaggaaataactttgagtttacttacaccttcgaggacgttcctttccatagcatgtttgcccacaaccagacgctagaccggctgatgaatcccctcgtggatcagtacctctgggctttcagctccgtcagccaagcaggctcatctggacgagctcttcattactcgcgggcgactaaaaccaacatggcggctcaatataggaactggttacctgggcctttcttccgtgatcagcaaatctttacgggcgctagcaacatcactaaaaataacgtctttagcgtttgggaaaaaggcaagcaatgggaactcgacaatcggaccaacctaatgcagcccggtcctgcggcagcgaccacctttagcggagaacctgaccgtcaagccatgcaaaacacgctggcttttagcaggaccgtctacgatcaaacgaccgccacgaccgatcgtaaccagatactcatcaccaacgaagacgaaatcagacccaccaactcggtcggtatcgacgcgtggggagcagttcccaccaacaaccagtcgatcgtgacccccggcactcgcgcggccgtcaacaatcaaggggcgcttcccgggatggtgtggcaaaacagagacatttaccctacagggacccatttggccaaaattcccgacactgacaatcacttccatccgtccccgcttattgggcggtttggctgcaagcatccccctccccagattttcattaaaaacacacccgtccctgccaacccttcggaaacgttccagacggccaaagtggcctccttcatcaaccagtactcgaccggacagtgcaccgtcgaaatcttttgggaactcaagaaggaaacctccaagcgctggaaccccgaaatccagttcacctccaactttggcaacgcggccgacatccagtttgccgtctccgacacgggatcctattccgaacctcgtcccatcggtacccgttaccttaccaaacctctgtaa

SEQ ID NO: 537 - DNA, 2232 bp, Artificial Sequence
  Description of Artificial Sequence: Synthetic polynucleotide
atgtctctcatttctgatgcgattccagattggttggagcggttggtcaaaaagggagtgaatgctgcagctgatttctaccatttggaaagcggtcctcctcgtcctaaggcaaatcagcaaactcaagaatctcttgaaaaggacgattcgagaggtctcgtgttcccaggctacaattatctaggccctttcaacggtctagataaaggagaacccgtcaacgaggcagacgctgccgccttagaacacgacaaggcttacgacctcgaaatcaaggacgggcacaacccgtactttgagtacaacgaggccgacagacgtttccaggaacgtctcaaagacgatacctcctttggaggcaatttaggtaaagccatcttccaggccaaaaagagggttctcgaaccctttggtctggtggaagactcaaagacggctccgaccggagacaagcggaaaggcgaagacgaacctcgtttgcccgacacttcttcacagactcccaagaaaaacaagaagcctcgcaaggaaagaccttccggcggggcagaagatccgggcgaaggcacctcttccaacgctggagcagcagcacccgcctctagtgtgggatcatctatcatggctgaaggaggtggcggcccagtgggcgatgcaggccagggtgccgatggagtgggcaattcctccggaaattggcattgcgattcccaatggctggaaaacggagtcgtcactcgaaccacccgaacctgggtcttgcccagctacaacaaccacctgtacaaacgaatccaaggacccagcggaggcgacaacaacaacaaattctttggattcagcaccccctggggatactttgactacaatcgattccactgccacttttccccgcgagactggcaacgactcatcaacaacaactggggcatccgtcccaaagcgatgcgctttagactctttaacatccaggttaaagaggtcacggtccaagacttcaacaccaccatcggcaacaacctcaccagtacggtccaggtctttgcggacaaggactaccaactgccgtacgtcctcggatcggctaccgaaggcaccttcccgccgttcccagcggatatctacacgatcccgcagtacgggtactgcacgctaaactacaacaacgaggcggtggatcgttcggccttctactgtctggactactttccctcagacatgctgcggacaggaaataactttgagtttacttacaccttcgaggacgttcctttccatagcatgtttgcccacaaccagacgctagaccggctgatgaatcccctcgtggatcagtacctctgggctttcagctccgtcagccaagcaggctcatctggacgagctcttcattactcgcgggcgactaaaaccaacatggcggctcaatataggaactggttacctgggcctttcttccgtgatcagcaaatctttacgggcgctagcaacatcactaaaaataacgtctttagcgtttgggaaaaaggcaagcaatgggaactcgacaatcggaccaacctaatgcagcccggtcctgcggcagcgaccacctttagcggagaacctgaccgtcaagccatgcaaaacacgctggcttttagcaggaccgtctacgatcaaacgaccgccacgaccgatcgtaaccagatactcatcaccaacgaagacgaaatcagacccaccaactcggtcggtatcgacgcgtggggagcagttcccaccaacaaccagtcgatcgtgacccccggcactcgcgcggccgtcaacaatcaaggggcgcttcccgggatggtgtggcaaaacagagacatttaccctacagggacccatttggccaaaattcccgacactgacaatcacttccatccgtccccgcttattgggcggtttggctgcaagcatccccctccccagattttcattaaaaacacacccgtccctgccaacccttcggaaacgttccagacggccaaagtggcctccttcatcaaccagtactcgaccggacagtgcaccgtcgaaatcttttgggaactcaagaaggaaacctccaagcgctggaaccccgaaatccagttcacctccaactttggcaacgcggccgacatccagtttgccgtctccgacacgggatcctattccgaacctcgtcccatcggtacccgttaccttaccaaacctctgtaa

SEQ ID NO: 538 - protein, 535 aa, Artificial Sequence
  Description of Artificial Sequence: Synthetic polypeptide
MAEGGGGPVGDAGQGADGVGNSSGNWHCDSQWLENGVVTRTTRTWVLPSYNNHLYKRIQGPSGGDNNNKFFGFSTPWGYFDYNRFHCHFSPRDWQRLINNNWGIRPKAMRFRLFNIQVKEVTVQDFNTTIGNNLTSTVQVFADKDYQLPYVLGSATEGTFPPFPADIYTIPQYGYCTLNYNNEAVDRSAFYCLDYFPSDMLRTGNNFEFTYTFEDVPFHSMFAHNQTLDRLMNPLVDQYLWAFSSVSQAGSSGRALHYSRATKTNMAAQYRNWLPGPFFRDQQIFTGASNITKNNVFSVWEKGKQWELDNRTNLMQPGPAAATTFSGEPDRQAMQNTLAFSRTVYDQTTATTDRNQILITNEDEIRPTNSVGIDAWGAVPTNNQSIVTPGTRAAVNNQGALPGMVWQNRDIYPTGTHLAKIPDTDNHFHPSPLIGRFGCKHPPPQIFIKNTPVPANPSETFQTAKVASFINQYSTGQCTVEIFWELKKETSKRWNPEIQFTSNFGNAADIQFAVSDTGSYSEPRPIGTRYLTKPL

SEQ ID NO: 539 - protein, 440 aa, Artificial Sequence
  Description of Artificial Sequence: Synthetic polypeptide
MELVDWLVEKGITTEKEWLLENRESFRSFQASSNSARQIKTALQGAIQEMLLTKTAEDYLVGKDPVSDDDIRQNRIYKILELNHYDPAYVGSILVGWCQKKWGKRNTLWLFGHATTGKTNIAEAIAHAVPFYGCVNWTNENFPFNDCVEKMIIWWEEGKMTAKVVETAKAILGGSRVRVDQKCKASVPIEPTPVIITSNTNMCYVIDGNTTTFEHKQPLEDRMFKLELLTRLPDDFGKVTKQEVRQFFRWSQDHLTPVIPEFLVRKAESRKRPAPSGEGYISPTKRPALAEQQQASESADPVPTRYRIKCSKHCGMDKMLFPCQICESMNRDINICAIHKTTDCKECFPDYGDKDDVELPPCTEHNVSRCYQCHSGELYRVTSDSDEKPAPESDEGTEPSYAPCTIHHLMGKSHGLVTCAACRLKNSTLHDDLDDGDLEQ

SEQ ID NO: 540 - protein, 319 aa, Artificial Sequence
  Description of Artificial Sequence: Synthetic polypeptide
MELVDWLVEKGITTEKEWLLENRESFRSFQASSNSARQIKTALQGAIQEMLLTKTAEDYLVGKDPVSDDDIRQNRIYKILELNHYDPAYVGSILVGWCQKKWGKRNTLWLFGHATTGKTNIAEAIAHAVPFYGCVNWTNENFPFNDCVEKMIIWWEEGKMTAKVVETAKAILGGSRVRVDQKCKASVPIEPTPVIITSNTNMCYVIDGNTTTFEHKQPLEDRMFKLELLTRLPDDFGKVTKQEVRQFFRWSQDHLTPVIPEFLVRKAESRKRPAPSGEGYISPTKRPALAEQQQASESADPVPTRLVGAVGQKGSECCS

SEQ ID NO: 541 - protein, 662 aa, Artificial Sequence
  Description of Artificial Sequence: Synthetic polypeptide
MRSYYEVIVQLPNDVESQVPGISDSFVNWITSREWTLPEDADWDLDQVDQVQLTLGDKIQREIRTHWGTMAKEPDFHYFIQLEQGEVFFHLHVLLETCSVKPMVLGRYIRHIQQKIVSKVYCATSLRWKDGCVVTKTKNFGGANKVRAESYIPAYLIPKQQPEVQWAWTNVPEYIKACLHRELRASLARLHFEEAGVSQSKENLARTADGAPVMPTRVSKRYMELVDWLVEKGITTEKEWLLENRESFRSFQASSNSARQIKTALQGAIQEMLLTKTAEDYLVGKDPVSDDDIRQNRIYKILELNHYDPAYVGSILVGWCQKKWGKRNTLWLFGHATTGKTNIAEAIAHAVPFYGCVNWTNENFPFNDCVEKMIIWWEEGKMTAKVVETAKAILGGSRVRVDQKCKASVPIEPTPVIITSNTNMCYVIDGNTTTFEHKQPLEDRMFKLELLTRLPDDFGKVTKQEVRQFFRWSQDHLTPVIPEFLVRKAESRKRPAPSGEGYISPTKRPALAEQQQASESADPVPTRYRIKCSKHCGMDKMLFPCQICESMNRDINICAIHKTTDCKECFPDYGDKDDVELPPCTEHNVSRCYQCHSGELYRVTSDSDEKPAPESDEGTEPSYAPCTIHHLMGKSHGLVTCAACRLKNSTLHDDLDDGDLEQ

SEQ ID NO: 542 - protein, 541 aa, Artificial Sequence
  Description of Artificial Sequence: Synthetic polypeptide
MRSYYEVIVQLPNDVESQVPGISDSFVNWITSREWTLPEDADWDLDQVDQVQLTLGDKIQREIRTHWGTMAKEPDFHYFIQLEQGEVFFHLHVLLETCSVKPMVLGRYIRHIQQKIVSKVYCATSLRWKDGCVVTKTKNFGGANKVRAESYIPAYLIPKQQPEVQWAWTNVPEYIKACLHRELRASLARLHFEEAGVSQSKENLARTADGAPVMPTRVSKRYMELVDWLVEKGITTEKEWLLENRESFRSFQASSNSARQIKTALQGAIQEMLLTKTAEDYLVGKDPVSDDDIRQNRIYKILELNHYDPAYVGSILVGWCQKKWGKRNTLWLFGHATTGKTNIAEAIAHAVPFYGCVNWTNENFPFNDCVEKMIIWWEEGKMTAKVVETAKAILGGSRVRVDQKCKASVPIEPTPVIITSNTNMCYVIDGNTTTFEHKQPLEDRMFKLELLTRLPDDFGKVTKQEVRQFFRWSQDHLTPVIPEFLVRKAESRKRPAPSGEGYISPTKRPALAEQQQASESADPVPTRLVGAVGQKGSECCS

SEQ ID NO: 543 - protein, 743 aa, Artificial Sequence
  Description of Artificial Sequence: Synthetic polypeptide
MSLISDAIPDWLERLVKKGVNAAADFYHLESGPPRPKANQQTQESLEKDDSRGLVFPGYNYLGPFNGLDKGEPVNEADAAALEHDKAYDLEIKDGHNPYFEYNEADRRFQERLKDDTSFGGNLGKAIFQAKKRVLEPFGLVEDSKTAPTGDKRKGEDEPRLPDTSSQTPKKNKKPRKERPSGGAEDPGEGTSSNAGAAAPASSVGSSIMAEGGGGPVGDAGQGADGVGNSSGNWHCDSQWLENGVVTRTTRTWVLPSYNNHLYKRIQGPSGGDNNNKFFGFSTPWGYFDYNRFHCHFSPRDWQRLINNNWGIRPKAMRFRLFNIQVKEVTVQDFNTTIGNNLTSTVQVFADKDYQLPYVLGSATEGTFPPFPADIYTIPQYGYCTLNYNNEAVDRSAFYCLDYFPSDMLRTGNNFEFTYTFEDVPFHSMFAHNQTLDRLMNPLVDQYLWAFSSVSQAGSSGRALHYSRATKTNMAAQYRNWLPGPFFRDQQIFTGASNITKNNVFSVWEKGKQWELDNRTNLMQPGPAAATTFSGEPDRQAMQNTLAFSRTVYDQTTATTDRNQILITNEDEIRPTNSVGIDAWGAVPTNNQSIVTPGTRAAVNNQGALPGMVWQNRDIYPTGTHLAKIPDTDNHFHPSPLIGRFGCKHPPPQIFIKNTPVPANPSETFQTAKVASFINQYSTGQCTVEIFWELKKETSKRWNPEIQFTSNFGNAADIQFAVSDTGSYSEPRPIGTRYLTKPL

SEQ ID NO: 544 - protein, 598 aa, Artificial Sequence
  Description of Artificial Sequence: Synthetic polypeptide
TAPTGDKRKGEDEPRLPDTSSQTPKKNKKPRKERPSGGAEDPGEGTSSNAGAAAPASSVGSSIMAEGGGGPVGDAGQGADGVGNSSGNWHCDSQWLENGVVTRTTRTWVLPSYNNHLYKRIQGPSGGDNNNKFFGFSTPWGYFDYNRFHCHFSPRDWQRLINNNWGIRPKAMRFRLFNIQVKEVTVQDFNTTIGNNLTSTVQVFADKDYQLPYVLGSATEGTFPPFPADIYTIPQYGYCTLNYNNEAVDRSAFYCLDYFPSDMLRTGNNFEFTYTFEDVPFHSMFAHNQTLDRLMNPLVDQYLWAFSSVSQAGSSGRALHYSRATKTNMAAQYRNWLPGPFFRDQQIFTGASNITKNNVFSVWEKGKQWELDNRTNLMQPGPAAATTFSGEPDRQAMQNTLAFSRTVYDQTTATTDRNQILITNEDEIRPTNSVGIDAWGAVPTNNQSIVTPGTRAAVNNQGALPGMVWQNRDIYPTGTHLAKIPDTDNHFHPSPLIGRFGCKHPPPQIFIKNTPVPANPSETFQTAKVASFINQYSTGQCTVEIFWELKKETSKRWNPEIQFTSNFGNAADIQFAVSDTGSYSEPRPIGTRYLTKPL

SEQ ID NO: 545 - DNA, 4694 bp, Artificial Sequence
  Description of Artificial Sequence: Synthetic polynucleotide
tggccagtttccaagacaggctcgctcgctcactcgggccggggccccaaaggggcccctagcgaccgcttcgcggtcgcggcccgagtgagcgagcgagcctgtcttggaaactggccagcactccggtgaggtaatgccgtcacgtggtcgggaatgggaacgggaaatctcgcgagaacgtaaacaaatataagacggcgccacacggcgctgcgtcatacgcgcgcgcgcaccggcgagatgaggtcgtactacgaggtcatcgttcagctgcccaacgacgtcgagagtcaggtacctggaatctccgattcgttcgtcaactggattacgtcgcgagaatggacgttgcctgaggacgccgattgggatttggaccaggtcgatcaagttcaactgacgctcggcgacaaaatccaacgggagattcgaactcattgggggacgatggccaaagaaccggactttcactattttatccaactggaacaaggtgaggtgttctttcatttacacgtcctgctggaaacgtgttccgtaaagccgatggtactcggaagatatatccgacatattcaacaaaaaattgtgagtaaagtctactgcgccacgagcctacgatggaaggatggatgcgtggtgaccaagaccaaaaatttcgggggcgcgaacaaggtccgggccgagtcgtatattcccgcctacctgatcccgaaacagcaaccggaagtgcagtgggcgtggactaacgtgcccgagtatataaaagcgtgcttgcaccgagaactgcgtgccagtctcgcgcgacttcacttcgaggaggcgggcgtctcgcaatccaaggaaaatctcgcgagaactgcagacggcgctcccgtgatgccgacccgcgtcagcaaacgctacatggagctcgtggattggctcgtggagaaggggatcaccaccgagaaggaatggctgctggaaaacagagaaagctttcggagctttcaggcctcgagcaactcggcgcgtcagatcaagacggccctgcaaggcgccattcaggagatgcttctgaccaagacggcggaggactacctcgtcggaaaggatcccgtctcggacgacgacatccgtcagaaccgcatctacaagattctggaactgaaccactacgacccagcgtacgtggggagtattttggtcgggtggtgccagaagaaatggggcaagcgaaacacgctgtggctgttcggacatgcgaccaccggcaagaccaacatcgcggaggctattgcccatgctgtgccgttctatggatgcgttaactggaccaacgagaactttccgttcaacgactgcgtcgaaaaaatgattatctggtgggaggagggcaaaatgaccgccaaagtggtggaaacagccaaggcgattctgggaggatctcgggtgagagtggaccaaaaatgcaaagcttcggttccgatcgaaccgacgccggtcattattaccagtaacaccaacatgtgttatgtcatcgacgggaacacgaccacgttcgagcataagcagccgttggaggacaggatgtttaagctcgaattgctgactcggttgcctgatgactttggtaaggtgaccaaacaggaggtgcgtcaattcttcaggtggtctcaggatcacctgacccctgtgatcccagaattcctagtgcggaaggcggagtctcgcaaaagacccgccccttccggggaaggctatataagcccgacaaagcggcccgcgctcgcagagcagcagcaggcgtcggagagcgcggacccggttcccaccaggtatcgtatcaaatgctcgaaacattgcggtatggataaaatgttgtttccttgccaaatttgtgaatcgatgaacagagatattaatatttgtgctattcataaaacgaccgactgtaaagagtgtttccccgactacggggataaagatgatgtagaactacccccctgtacagaacacaacgtgtctcgttgttatcaatgtcattcgggcgaattgtatcgcgtgacttcggactctgacgagaaacctgcccccgagagtgatgaaggcaccgagccatcctatgctccctgcacgattcaccacctgatgggcaagagtcacgggttagtcacttgcgcggcgtgtcggttgaaaaatagtacgttgcatgatgacttggatgacggtgatctcgaacaataaatgattgaaatgtagccatgtctctcatttctgatgcgattccagattggttggagcggttggtcaaaaagggagtgaatgctgcagctgatttctaccatttggaaagcggtcctcctcgtcctaaggcaaatcagcaaactcaagaatctcttgaaaaggacgattcgagaggtctcgtgttcccaggctacaattatctaggccctttcaacggtctagataaaggagaacccgtcaacgaggcagacgctgccgccttagaacacgacaaggcttacgacctcgaaatcaaggacgggcacaacccgtactttgagtacaacgaggccgacagacgtttccaggaacgtctcaaagacgatacctcctttggaggcaatttaggtaaagccatcttccaggccaaaaagagggttctcgaaccctttggtctggtggaagactcaaagacggctccgaccggagacaagcggaaaggcgaagacgaacctcgtttgcccgacacttcttcacagactcccaagaaaaacaagaagcctcgcaaggaaagaccttccggcggggcagaagatccgggcgaaggcacctcttccaacgctggagcagcagcacccgcctctagtgtgggatcatctatcatggctgaaggaggtggcggcccagtgggcgatgcaggccagggtgccgatggagtgggcaattcctccggaaattggcattgcgattcccaatggctggaaaacggagtcgtcactcgaaccacccgaacctgggtcttgcccagctacaacaaccacctgtacaaacgaatccaaggacccagcggaggcgacaacaacaacaaattctttggattcagcaccccctggggatactttgactacaatcgattccactgccacttttccccgcgagactggcaacgactcatcaacaacaactggggcatccgtcccaaagcgatgcgctttagactctttaacatccaggttaaagaggtcacggtccaagacttcaacaccaccatcggcaacaacctcaccagtacggtccaggtctttgcggacaaggactaccaactgccgtacgtcctcggatcggctaccgaaggcaccttcccgccgttcccagcggatatctacacgatcccgcagtacgggtactgcacgctaaactacaacaacgaggcggtggatcgttcggccttctactgtctggactactttccctcagacatgctgcggacaggaaataactttgagtttacttacaccttcgaggacgttcctttccatagcatgtttgcccacaaccagacgctagaccggctgatgaatcccctcgtggatcagtacctctgggctttcagctccgtcagccaagcaggctcatctggacgagctcttcattactcgcgggcgactaaaaccaacatggcggctcaatataggaactggttacctgggcctttcttccgtgatcagcaaatctttacgggcgctagcaacatcactaaaaataacgtctttagcgtttgggaaaaaggcaagcaatgggaactcgacaatcggaccaacctaatgcagcccggtcctgcggcagcgaccacctttagcggagaacctgaccgtcaagccatgcaaaacacgctggcttttagcaggaccgtctacgatcaaacgaccgccacgaccgatcgtaaccagatactcatcaccaacgaagacgaaatcagacccaccaactcggtcggtatcgacgcgtggggagcagttcccaccaacaaccagtcgatcgtgacccccggcactcgcgcggccgtcaacaatcaaggggcgcttcccgggatggtgtggcaaaacagagacatttaccctacagggacccatttggccaaaattcccgacactgacaatcacttccatccgtccccgcttattgggcggtttggctgcaagcatccccctccccagattttcattaaaaacacacccgtccctgccaacccttcggaaacgttccagacggccaaagtggcctccttcatcaaccagtactcgaccggacagtgcaccgtcgaaatcttttgggaactcaagaaggaaacctccaagcgctggaaccccgaaatccagttcacctccaactttggcaacgcggccgacatccagtttgccgtctccgacacgggatcctattccgaacctcgtcccatcggtacccgttaccttaccaaacctctgtaaattaaacccttcaataaaccgtttatgcgtaactgtatttccgtctcctgtcgttattcagtcacatgatgcggcattacctcaccggagtgctggccagtttccaagacaggctcgctcgctcactcgggccggggccccaaaggggcccctagcgaccgcttcgcggtcgcggcccgagtgagcgagcgagcctgtcttggaaactggcca

SEQ ID NO: 546 - DNA, 2211 bp, Artificial Sequence
  Description of Artificial Sequence: Synthetic polynucleotide
atggctgctgatggttatcttccagattggctcgaggacactctctctgaaggaataagacagtggtggaagctcaaacctggcccaccaccaccaaagcccgcagagcggcataaggacgacagcaggggtcttgtgcttcctgggtacaagtacctcggacccttcaacggactcgacaagggagagccggtcaacgaggcagacgcagcggccctcgagcacgacaaggcctacgaccagcagctcaaggccggtgacaacccctacctcaagtacaaccacgccgacgcggagttccagcagcggcttcagggcgacacatcgtttgggggcaacctcggcagagcagtcttccaggccaaaaagagggttcttgaacctcttggtctggttgagcaagcgggtgagacggctcctggaaagaagagaccgttgattgaatccccccagcagcccgactcctccacgggtatcggcaaaaaaggcaagcagccggctaaaaagagactcaattttggtcagactggcgactcagagtcagtccccgacccacaacctctcggagaacctccagcaacccccgctgctgtgggacctactacaatggcttcaggtggtggcgcaccaatggcagacaataacgaaggcgccgacggagtgggtaatgcctcaggaaattggcattgcgattccacatggctgggcgacagagtcatcaccaccagcacccgcacctgggccttgcccacctacaataaccacctctacaagcaaatctccagtgcttcaacgggggccagcaacgacaaccactacttcggctacagcaccccctgggggtattttgacttcaacagattccactgccacttttcaccacgtgactggcagcgactcatcaacaacaattggggattccggcccaagagactcaacttcaaactcttcaacatccaagtcaaggaggtcacgacgaatgatggcgtcacaaccatcgctaataaccttaccagcacggttcaagtcttctcggactcagactatcagctcccgtacgtgctcgggtcggctcacgagggctgcctcccgccgttcccagcagacgtcttcatggtgccacagtatggatacctcaccctgaacaacgggagtcaggcagtaggacgctcttcattttactgcctggagtactttccttctcagatgctgcgtaccggaaacaactttaccttcagctacacttttgaggacgttcctttccacagcagctacgctcacagccagagtctggaccgtctcatgaatcctctcatcgaccagtacctgtattacctgaacagaactcagaatcagtccggaagtgcccaaaacaaggacttgctgtttagccgggggtctccagctggcatgtctgttcagcccaaaaactggctacctggaccctgttatcggcagcagcgcgtttctaaaacaaaaacagacaacaacaacagcaactttacctggactggtgcttcaaaatataaccttaatgggcgtgaatctataatcaaccctggcactgctatggcctcacacaaagacgacaaagacaagttctttcccatgagcggtgtcatgatttttggaaaggagagcgccggagcttcaaacactgcattggacaatgtcatgatcacagacgaagaggaaatcaaagccactaaccccgtggccaccgaaagatttgggactgtggcagtcaatctccagagcagcagcacagaccctgcgaccggagatgtgcatgttatgggagccttacctggaatggtgtggcaagacagagacgtatacctgcagggtcccatttgggccaaaattcctcacacagatggacactttcacccgtctcctcttatgggcggctttggactcaagaacccgcctcctcagatcctcatcaaaaacacgcctgttcctgcgaatcctccggcggagttttcagctacaaagtttgcttcattcatcacccaatactccacaggacaagtgagtgtggaaattgaatgggagctgcagaaagaaaacagcaagcgctggaatcccgaagtgcagtacacatccaattatgcaaaatctgccaacgttgattttactgtggacaacaatggactttatactgagcctcgccccattggcacccgttacctcacccgtcccctgtaa

SEQ ID NO: 547 - protein, 736 aa, Artificial Sequence
  Description of Artificial Sequence: Synthetic polypeptide
MAADGYLPDWLEDTLSEGIRQWWKLKPGPPPPKPAERHKDDSRGLVLPGYKYLGPFNGLDKGEPVNEADAAALEHDKAYDQQLKAGDNPYLKYNHADAEFQQRLQGDTSFGGNLGRAVFQAKKRVLEPLGLVEQAGETAPGKKRPLIESPQQPDSSTGIGKKGKQPAKKRLNFGQTGDSESVPDPQPLGEPPATPAAVGPTTMASGGGAPMADNNEGADGVGNASGNWHCDSTWLGDRVITTSTRTWALPTYNNHLYKQISSASTGASNDNHYFGYSTPWGYFDFNRFHCHFSPRDWQRLINNNWGFRPKRLNFKLFNIQVKEVTTNDGVTTIANNLTSTVQVFSDSDYQLPYVLGSAHEGCLPPFPADVFMVPQYGYLTLNNGSQAVGRSSFYCLEYFPSQMLRTGNNFTFSYTFEDVPFHSSYAHSQSLDRLMNPLIDQYLYYLNRTQNQSGSAQNKDLLFSRGSPAGMSVQPKNWLPGPCYRQQRVSKTKTDNNNSNFTWTGASKYNLNGRESIINPGTAMASHKDDKDKFFPMSGVMIFGKESAGASNTALDNVMITDEEEIKATNPVATERFGTVAVNLQSSSTDPATGDVHVMGALPGMVWQDRDVYLQGPIWAKIPHTDGHFHPSPLMGGFGLKNPPPQILIKNTPVPANPPAEFSATKFASFITQYSTGQVSVEIEWELQKENSKRWNPEVQYTSNYAKSANVDFTVDNNGLYTEPRPIGTRYLTRPL

SEQ ID NO: 548 - DNA, 2211 bp, Artificial Sequence
  Description of Artificial Sequence: Synthetic polynucleotide
atggcttccgatggttatcttccagattggctcgaggacaacctctctgagggcatccgcgagtggtgggacttgaaacctggagccccgaaacccaaagccaaccagcaaaagcaggacgacggccggggtctggtgcttcctggctacaagtacctcggacccttcaacggactcgacaagggggagcccgtcaacgcggcggatgcagcggccctcgagcacgacaaggcctacgaccagcagctcagagcgggtgacaatccgtacctgcggtataaccacgccgacgccgagtttcaggagcgtctgcaagaagatacgtcttttgggggcaacctcgggcgagcagtcttccaggccaagaagagggttctcgaaccttttggtctggttgaggaaggtgctaagacggctcctggaaagaaacgtccggtagagcagtcgccacaagagccagactcctcctcgggcattggcaagacaggccagcagcccgctaaaaagagactcaattttggtcagactggcgactcagagtcagtccccgacccacaacctctcggagaacctccagcaacccccgctgctgtgggacctactacaatggcttcaggcggtggcgcaccaatggcagacaataacgaaggcgccgacggagtgggtaatgcctcaggaaattggcattgcgattccacatggctgggcgacagagtcatcaccaccagcacccgaacatgggccttgcccacctataacaaccacctctacaagcaaatctccagtgcttcaacgggggccagcaacgacaaccactacttcggctacagcaccccctgggggtattttgatttcaacagattccactgccatttctcaccacgtgactggcagcgactcatcaacaacaattggggattccggcccaagagactcaacttcaaactcttcaacatccaagtcaaggaggtcacgacgaatgatggcgtcacaaccatcgctaataaccttaccagcacggttcaagtcttctcggactcggagtaccagcttccgtacgtcctcggctctgcgcaccagggctgcctccctccgttcccggcggacgtgttcatgattccgcagtacggctacctaacgctcaacaatggcagccaggcagtgggacggtcatccttttactgcctggaatatttcccatcgcagatgctgagaacgggcaataactttaccttcagctacaccttcgaggacgtgcctttccacagcagctacgcgcacagccagagcctggaccggctgatgaatcctctcatcgaccagtacctgtattacctgaacagaactcagaatcagtccggaagtgcccaaaacaaggacttgctgtttagccgggggtctccagctggcatgtctgttcagcccaaaaactggctacctggaccctgttaccggcagcagcgcgtttctaaaacaaaaacagacaacaacaacagcaactttacctggactggtgcttcaaaatataaccttaatgggcgtgaatctataatcaaccctggcactgctatggcctcacacaaagacgacaaagacaagttctttcccatgagcggtgtcatgatttttggaaaggagagcgccggagcttcaaacactgcattggacaatgtcatgatcacagacgaagaggaaatcaaagccactaaccccgtggccaccgaaagatttgggactgtggcagtcaatctccagagcagcagcacagaccctgcgaccggagatgtgcatgttatgggagccttacctggaatggtgtggcaagacagagacgtatacctgcagggtcccatttgggccaaaattcctcacacagatggacactttcacccgtctcctcttatgggcggctttggacttaagcacccgcctcctcagatcctcatcaaaaacacgcctgttcctgcgaatcctccggcagagttttcggctacaaagtttgcttcattcatcacccagtattctactggccaagtcagcgtggagattgaatgggagctgcagaaagaaaacagcaaacgctggaatcccgaagtgcagtatacatctaactatgcaaaatctgccaacgttgatttcactgtggacaacaatggactttatactgagcctcgtcccattggcacccgttacctcacccgtcccctgtaa

SEQ ID NO: 549 - protein, 736 aa, Artificial Sequence
  Description of Artificial Sequence: Synthetic polypeptide
MASDGYLPDWLEDNLSEGIREWWDLKPGAPKPKANQQKQDDGRGLVLPGYKYLGPFNGLDKGEPVNAADAAALEHDKAYDQQLRAGDNPYLRYNHADAEFQERLQEDTSFGGNLGRAVFQAKKRVLEPFGLVEEGAKTAPGKKRPVEQSPQEPDSSSGIGKTGQQPAKKRLNFGQTGDSESVPDPQPLGEPPATPAAVGPTTMASGGGAPMADNNEGADGVGNASGNWHCDSTWLGDRVITTSTRTWALPTYNNHLYKQISSASTGASNDNHYFGYSTPWGYFDFNRFHCHFSPRDWQRLINNNWGFRPKRLNFKLFNIQVKEVTTNDGVTTIANNLTSTVQVFSDSEYQLPYVLGSAHQGCLPPFPADVFMIPQYGYLTLNNGSQAVGRSSFYCLEYFPSQMLRTGNNFTFSYTFEDVPFHSSYAHSQSLDRLMNPLIDQYLYYLNRTQNQSGSAQNKDLLFSRGSPAGMSVQPKNWLPGPCYRQQRVSKTKTDNNNSNFTWTGASKYNLNGRESIINPGTAMASHKDDKDKFFPMSGVMIFGKESAGASNTALDNVMITDEEEIKATNPVATERFGTVAVNLQSSSTDPATGDVHVMGALPGMVWQDRDVYLQGPIWAKIPHTDGHFHPSPLMGGFGLKHPPPQILIKNTPVPANPPAEFSATKFASFITQYSTGQVSVEIEWELQKENSKRWNPEVQYTSNYAKSANVDFTVDNNGLYTEPRPIGTRYLTRPL

SEQ ID NO: 550 - DNA, 2211 bp, Artificial Sequence
  Description of Artificial Sequence: Synthetic polynucleotide
atggctgctgatggttatcttccagattggctcgaggacactctctctgaaggaataagacagtggtggaagctcaaacctggcccaccaccaccaaagcccgcagagcggcataaggacgacagcaggggtcttgtgcttcctgggtacaagtacctcggacccttcaacggactcgacaagggagagccggtcaacgaggcagacgcagcggccctcgagcacgacaaggcctacgaccagcagctcaaggccggtgacaacccctacctcaagtacaaccacgccgacgcggagttccagcagcggcttcagggcgacacatcgtttgggggcaacctcggcagagcagtcttccaggccaaaaagagggttcttgaacctcttggtctggttgagcaagcgggtgagacggctcctggaaagaagagaccgttgattgaatccccccagcagcccgactcctccacgggtatcggcaaaaaaggcaagcagccggctaaaaagagactcaattttggtcagactggcgactcagagtcagtccccgacccacaacctctcggagaacctccagcaacccccgctgctgtgggacctactacaatggcttcaggtggtggcgcaccaatggcagacaataacgaaggcgccgacggagtgggtaatgcctcaggaaattggcattgcgattccacatggctgggcgacagagtcatcaccaccagcacccgcacctgggccttgcccacctacaataaccacctctacaagcaaatctccagtgcttcaacgggggccagcaacgacaaccactacttcggctacagcaccccctgggggtattttgacttcaacagattccactgccacttttcaccacgtgactggcagcgactcatcaacaacaattggggattccggcccaagagactcaacttcaaactcttcaacatccaagtcaaggaggtcacgacgaatgatggcgtcacaaccatcgctaataaccttaccagcacggttcaagtcttctcggactcagactatcagctcccgtacgtgctcgggtcggctcacgagggctgcctcccgccgttcccagcagacgtcttcatggtgccacagtatggatacctcaccctgaacaacgggagtcaggcagtaggacgctcttcattttactgcctggagtactttccttctcagatgctgcgtaccggaaacaactttaccttcagctacacttttgaggacgttcctttccacagcagctacgctcacagccagagtctggaccgtctcatgaatcctctcatcgaccagtacctgtattacctgaacagaactcagaatcagtccggaagtgcccaaaacaaggacttgctgtttagccgggggtctccaactggcatgtctgttcagcccaaaaactggctacctggaccctgttatcggcagcagcgcgtttctaaaacaaaaacagacaacaacaacagcaactttacctggactggtgcttcaaaatataaccttaatgggcgtgaatctataatcaaccctggcactgctatggcctcacacaaagacgacaaagacaagttctttcccatgagcggtgtcatgatttttggaaaggagagcgccggagcttcaaacactgcattggacaatgtcatgatcacagacgaagaggaaatcaaagccactaaccccgtggccactgaaagatttgggactgtggcagtcaatctccagagcagcagcacagaccctgcgaccggagatgtgcatgccatgggagccttacctggaatggtgtggcaagacagagacgtatacctgcagggtcctatttgggccaaaattcctcacacggatggacactttcacccgtctcctctcatgggcggctttggactcaagaacccgcctcctcagatcctcatcaaaaacacgcctgttcctgcgaatcctccggcggagttttcagctacaaagtttgcttcattcatcacccagtattccacaggacaagtgagcgtggagattgaatgggagctgcagaaagaaaacagcaaacgctggaatcccgaagtgcagtatacatctaactatgcaaaatctgccaacgttgatttcactgtggacaacaatggactttatactgagcctcgccccattggcacccgttacctcacccgtcccctgtaa

SEQ ID NO: 551 - protein, 736 aa, Artificial Sequence
  Description of Artificial Sequence: Synthetic polypeptide
MAADGYLPDWLEDTLSEGIRQWWKLKPGPPPPKPAERHKDDSRGLVLPGYKYLGPFNGLDKGEPVNEADAAALEHDKAYDQQLKAGDNPYLKYNHADAEFQQRLQGDTSFGGNLGRAVFQAKKRVLEPLGLVEQAGETAPGKKRPLIESPQQPDSSTGIGKKGKQPAKKRLNFGQTGDSESVPDPQPLGEPPATPAAVGPTTMASGGGAPMADNNEGADGVGNASGNWHCDSTWLGDRVITTSTRTWALPTYNNHLYKQISSASTGASNDNHYFGYSTPWGYFDFNRFHCHFSPRDWQRLINNNWGFRPKRLNFKLFNIQVKEVTTNDGVTTIANNLTSTVQVFSDSDYQLPYVLGSAHEGCLPPFPADVFMVPQYGYLTLNNGSQAVGRSSFYCLEYFPSQMLRTGNNFTFSYTFEDVPFHSSYAHSQSLDRLMNPLIDQYLYYLNRTQNQSGSAQNKDLLFSRGSPTGMSVQPKNWLPGPCYRQQRVSKTKTDNNNSNFTWTGASKYNLNGRESIINPGTAMASHKDDKDKFFPMSGVMIFGKESAGASNTALDNVMITDEEEIKATNPVATERFGTVAVNLQSSSTDPATGDVHAMGALPGMVWQDRDVYLQGPIWAKIPHTDGHFHPSPLMGGFGLKNPPPQILIKNTPVPANPPAEFSATKFASFITQYSTGQVSVEIEWELQKENSKRWNPEVQYTSNYAKSANVDFTVDNNGLYTEPRPIGTRYLTRPL

SEQ ID NO: 552 - DNA, 2211 bp, Artificial Sequence
  Description of Artificial Sequence: Synthetic polynucleotide
atggctgccgatggttatcttccagattggctcgaggacaacctctctgagggcattcgcgagtggtgggcgctgaaacctggagccccgaagcccaaagccaaccagcaaaagcaggacgacggccggggtctggtgcttcctggctacaagtacctcggacccttcaacggactcgacaagggggagcccgtcaacgcggcggatgcagcggccctcgagcacgacaaggcctacgaccagcagctcaaagcgggtgacaatccgtacctgcggtataaccacgccgacgccgagtttcaggagcgtctgcaagaagatacgtcttttgggggcaacctcgggcgagcagtcttccaggccaagaagcgggttctcgaacctctcggtctggttgaggaaggcgctaagacggctcctggaaagaaacgtccggtagagcaatcgccacaagagccagactcctcctcgggcatcggcaagacaggccagcagcccgctaaaaagagactcaattttggtcagactggcgactcagagtcagtccccgacccacaacctctcggagaacctccagcaacccccgctgctgtgggacctactacaatggcttcaggcggtggcgcaccaatggcagacaataacgaaggcgccgacggagtgggtaatgcctcaggaaattggcattgcgattccacatggctgggcgacagagtcatcaccaccagcacccgaacatgggccttgcccacctataacaaccacctctacaagcaaatctccagtgcttcgacgggggccagcaacgacaaccactacttcggctacagcaccccctgggggtattttgactttaacagattccactgccacttttcaccacgtgactggcagcgactcatcaacaacaactggggattccggcccaagagactcagcttcaagctcttcaacatccaggtcaaggaggtcacgacgaatgatggcgtcacaaccatcgctaataaccttaccagcacggttcaagtcttctcggactcggagtaccagcttccgtacgtcctcggctctgcgcaccagggctgcctccctccgttcccggcggacgtgttcatgattccgcaatacggctacctgacgctcaacaatggcagccaagccgtgggacgttcatccttttactgcctggaatatttcccttctcagatgctgagaacgggcaacaactttaccttcagctacacctttgaggaagtgcctttccacagcagctacgcgcacagccagagcctggaccggctgatgaatcctctcatcgatcaatacctgtattacctgaacagaactcaaaatcagtccggaagtgcccaaaacaaggacttgctgtttagccgtgggtctccagctggcatgtctgttcagcccaaaaactggctacctggaccctgttatcggcagcagcgcgtttctaaaacaaaaacagacaacaacaacagcaattttacctggactggtgcttcaaaatataacctcaatgggcgtgaatccatcatcaaccctggcactgctatggcctcacataaagacgacgaagacaagttctttcccatgagcggtgtcatgatttttggaaaagagagcgccggagcttcaaacactgcattggacaatgtcatgattacagacgaagaggaaattaaagccactaaccctgtggccaccgaaagatttgggaccgtggcagtcaatttccagagcagcagcacagaccctgcgaccggagatgtgcatgctatgggagcattacctggcatggtgtggcaagatagagacgtgtacctgcagggtcccatttgggccaaaattcctcacacagatggacactttcacccgtctcctcttatgggcggctttggactcaagaacccgcctcctcagatcctcatcaaaaacacgcctgttcctgcgaatcctccggcggagttttcagctacaaagtttgcttcattcatcacccaatactccacaggacaagtgagcgtggagattgaatgggagctgcagaaagaaaacagcaaacgctggaatcccgaagtgcagtatacatctaactatgcaaaatctgccaacattgatttcactgtggacaacaatggactttatactgagcctcgccccattggcacccgttacctcacccgtccccagtaa

SEQ ID NO: 553 - protein, 736 aa, Artificial Sequence
  Description of Artificial Sequence: Synthetic polypeptide
MAADGYLPDWLEDNLSEGIREWWALKPGAPKPKANQQKQDDGRGLVLPGYKYLGPFNGLDKGEPVNAADAAALEHDKAYDQQLKAGDNPYLRYNHADAEFQERLQEDTSFGGNLGRAVFQAKKRVLEPLGLVEEGAKTAPGKKRPVEQSPQEPDSSSGIGKTGQQPAKKRLNFGQTGDSESVPDPQPLGEPPATPAAVGPTTMASGGGAPMADNNEGADGVGNASGNWHCDSTWLGDRVITTSTRTWALPTYNNHLYKQISSASTGASNDNHYFGYSTPWGYFDFNRFHCHFSPRDWQRLINNNWGFRPKRLSFKLFNIQVKEVTTNDGVTTIANNLTSTVQVFSDSEYQLPYVLGSAHQGCLPPFPADVFMIPQYGYLTLNNGSQAVGRSSFYCLEYFPSQMLRTGNNFTFSYTFEEVPFHSSYAHSQSLDRLMNPLIDQYLYYLNRTQNQSGSAQNKDLLFSRGSPAGMSVQPKNWLPGPCYRQQRVSKTKTDNNNSNFTWTGASKYNLNGRESIINPGTAMASHKDDEDKFFPMSGVMIFGKESAGASNTALDNVMITDEEEIKATNPVATERFGTVAVNFQSSSTDPATGDVHAMGALPGMVWQDRDVYLQGPIWAKIPHTDGHFHPSPLMGGFGLKNPPPQILIKNTPVPANPPAEFSATKFASFITQYSTGQVSVEIEWELQKENSKRWNPEVQYTSNYAKSANIDFTVDNNGLYTEPRPIGTRYLTRPQ

SEQ ID NO: 554 - DNA, 2211 bp, Artificial Sequence
  Description of Artificial Sequence: Synthetic polynucleotide
atggctgccgatggttatcttccagattggctcgaggacaacctctctgagggcattcgcgagtggtgggacttgaaacctggagccccgaaacccaaagccaaccagcaaaagcaggacgacggccggggtctggtgcttcctggctacaagtacctcggacccttcaacggactcgacaagggggagcccgtcaacgcggcggatgcagcggccctcgagcacgacaaggcctacgaccagcagctcaaagcgggtgacaatccgtaccttcggtataaccacgccgacgccgagtttcaggagcgtctgcaagaagatacgtcttttgggggcaacctcgggcgagcagtcttccaggccaaaaagagggttctcgaacctctcggtctggttgaggaagcggctaagacggctcctggaaagaaacgtccggtagagcagtcgccacaagagccagactcctcctcgggcattggcaagacaggccagcagcccgctaaaaagagactcaattttggtcagactggcgactcagagtcagtccccgacccacaacctctcggagaacctcccgcagccccctcaggtgtgggatctcttacaatggcttcaggtggtggcgcaccaatggcagacaataacgaaggcgccgacggagtgggtaatgcctcaggaaattggcattgcgattccacatggctgggcgacagagtcatcaccaccagcacccgcacctgggccttgcccacctacaataaccacctctacaagcaaatctccagtgcttcaacgggggccagcaacgacaaccactacttcggctacagcaccccctgggggtattttgacttcaacagattccactgccacttttcaccacgtgactggcaaagactcatcaacaacaattggggattccggcccaagagactcaacttcaagctcttcaacatccaagtcaaggaggtcacgacgaatgatggcgtcacgaccatcgctaataaccttaccagcacggttcaagtcttctcggactcggagtaccagttgccgtacgtcctcggctctgcgcaccagggctgcctccctccgttcccggcggacgtgttcatgattccgcagtacggctacctaacgctcaacaatggcagccaggcagtgggacggtcatccttttactgcctggaatatttcccatcgcagatgctgagaacgggcaacaactttaccttcagctacacctttgaggaagtgcctttccacagcagctacgcgcacagccagagcctggaccggctgatgaatcctctcatcgaccagtacctgtattacctgaacagaactcaaaatcagtccggaagtgcccaaaacaaggacttgctgtttagccgtgggtctccagctggcatgtctgttcagcccaaaaactggctacctggaccctgttaccggcagcagtgcgtttctaaaacaaaaacagacaacaacaacagcaactttacctggactggtgcttcaaaatataaccttaatgggcgtgaatctataatcaaccctggcactgctatggcctcacacaaagacgacaaagacaagttctttcccatgagcggtgtcatgatttttggaaaggagagcgccggagcttcaaacactgcattggacaatgtcatgatcacagacgaagaggaaatcaaagccactaaccccgtggccaccgaaagatttgggactgtggcagtcaatctccagagcagcagcacagaccctgcgaccggagatgtgcatgttatgggagccttacctggaatggtgtggcaagacagagacgtatacctgcagggtcctatttgggccaaaattcctcacacagatggacactttcacccgtctcctcttatgggcggctttggactcaagaacccgcctcctcagatcctcatcaaaaacacgcctgttcctgcgaatcctccggcggagttttcagctacaaagtttgcttcattcatcacccaatactccacaggacaagtgagcgtggagattgaatgggagctgcagaaagaaaacagcaagcgctggaatcccgaagtgcagtacacatccaattatgcaaaatctgccaacgttgatttcactgtggacaacaatggactttatactgagcctcgccccattggcacccgttacctcacccgtcccctgtaa

SEQ ID NO: 555 - protein, 736 aa, Artificial Sequence
  Description of Artificial Sequence: Synthetic polypeptide
MAADGYLPDWLEDNLSEGIREWWDLKPGAPKPKANQQKQDDGRGLVLPGYKYLGPFNGLDKGEPVNAADAAALEHDKAYDQQLKAGDNPYLRYNHADAEFQERLQEDTSFGGNLGRAVFQAKKRVLEPLGLVEEAAKTAPGKKRPVEQSPQEPDSSSGIGKTGQQPAKKRLNFGQTGDSESVPDPQPLGEPPAAPSGVGSLTMASGGGAPMADNNEGADGVGNASGNWHCDSTWLGDRVITTSTRTWALPTYNNHLYKQISSASTGASNDNHYFGYSTPWGYFDFNRFHCHFSPRDWQRLINNNWGFRPKRLNFKLFNIQVKEVTTNDGVTTIANNLTSTVQVFSDSEYQLPYVLGSAHQGCLPPFPADVFMIPQYGYLTLNNGSQAVGRSSFYCLEYFPSQMLRTGNNFTFSYTFEEVPFHSSYAHSQSLDRLMNPLIDQYLYYLNRTQNQSGSAQNKDLLFSRGSPAGMSVQPKNWLPGPCYRQQCVSKTKTDNNNSNFTWTGASKYNLNGRESIINPGTAMASHKDDKDKFFPMSGVMIFGKESAGASNTALDNVMITDEEEIKATNPVATERFGTVAVNLQSSSTDPATGDVHVMGALPGMVWQDRDVYLQGPIWAKIPHTDGHFHPSPLMGGFGLKNPPPQILIKNTPVPANPPAEFSATKFASFITQYSTGQVSVEIEWELQKENSKRWNPEVQYTSNYAKSANVDFTVDNNGLYTEPRPIGTRYLTRPL

SEQ ID NO: 556 - DNA, 2211 bp, Artificial Sequence
  Description of Artificial Sequence: Synthetic polynucleotide
atggctgccgatggttatcttccagattggctcgaggacaacctctctgagggcattcgcgaatggtgggacttgaaacctggagccccgaaacccaaagtcaaccagcaaaagcaggacaacgctcggggtcttgtgcttccgggttacaaatacctcggacccttcaacggactcgacaagggggagcccgtcaacgcggcggacgcagcggccctcgagcacgacaaggcctacgaccagcagctcaaagcgggtgacaatccgtaccttcggtataaccacgccgacgccgagtttcaggagcgtctgcaagaagatacgtcttttgggggcaaccttggacgagcagtcttccaggccaagaagagggttctcgaaccttttggtctggttgaggaaggtgctaagacggctcctggaaagaaacgtccggtagagcagtcgccacaagagccagactcctcctcgggcattggcaagacaggccagcagcccgctaaaaagagactcaattttggtcagactggcgactcagagtcagtccccgacccacaacctctcggagaacctccagcaacccccgctgctgtgggacctactacaatggcttcaggcggtggcgcaccaatggcagacaataacgaaggcgccgacggagtgggtaatgcctcaggaaattggcattgcgattccacatggctgggcgacagagtcatcaccaccagcacccgcacctgggccttgcccacctacaataaccacctctacaagcaaatctccagtgcttcaacgggggccagcaacgacaaccactacttcggctacagcaccccctgggggtattttgacttcaacagattccactgccacttttcaccacgtgactggcaaagactcatcaacaacaattggggattccggcccaagagactcaacttcaagctcttcaacatccaagtcaaggaggtcacgacgaatgatggcgtcacgaccatcgctaataaccttaccagcacggttcaagtcttctcggactcggagtaccagttgccgtacgtcctcggctctgcgcaccagggctgcctccctccgttcccggcggacgtgttcatgattccgcaatacggctacctgacgctcaacaatggcagccaggcagtgggacggtcatccttttactgcctggaatatttcccatcgcagatgctgagaacgggcaataactttaccttcagctacacttttgaggacgttcctttccacagcagctacgctcacagccagagcctggaccggctgatgaatcctctcatcgaccagtacctgtattacctgaacagaactcagaatcagtccggaagtgcccaaaacaaggacttgctgtttagccgtgggtctccaactggcatgtctgttcagcccaaaaactggctacctggaccctgttatcggcagcagcgcgtttctaaaacaaaaacagacaacaacaacagcaactttacctggactggtgcttcaaaatataaccttaatgggcgtgaatctataatcaaccctggcactgctatggcctcacacaaagacgacgaagacaagttctttcccatgagcggtgtcatgatttttggaaaggagagcgccggagcttcaaacactgcattggacaatgtcatgatcacagacgaagaggaaatcaaagccactaaccccgtggccactgaaagatttgggactgtggcagtcaatctccagagcagcagcacagaccctgcgaccggagatgtgcatgccatgggagccttacctggaatggtgtggcaagacagagacgtatacctgcagggtcctatttgggccaaaattcctcacacggatggacactttcacccgtctcctctcatgggcggctttggacttaagcacccgcctcctcagatcctcatcaaaaacacgcctgttcctgcgaatcctccggcagagttttcggctacaaagtttgcttcattcatcacccagtattccacaggacaagtgagcgtggagattgaatgggagctgcagaaagaaaacagcaaacgctggaatcccgaagtgcagtatacatctaactatgcaaaatctgccaacgttgatttcactgtggacaacaatggactttatactgagcctcgccccattggcacccgttacctcacccgtcccctgtaa

SEQ ID NO: 557 - protein, 736 aa, Artificial Sequence
  Description of Artificial Sequence: Synthetic polypeptide
MAADGYLPDWLEDNLSEGIREWWDLKPGAPKPKVNQQKQDNARGLVLPGYKYLGPFNGLDKGEPVNAADAAALEHDKAYDQQLKAGDNPYLRYNHADAEFQERLQEDTSFGGNLGRAVFQAKKRVLEPFGLVEEGAKTAPGKKRPVEQSPQEPDSSSGIGKTGQQPAKKRLNFGQTGDSESVPDPQPLGEPPATPAAVGPTTMASGGGAPMADNNEGADGVGNASGNWHCDSTWLGDRVITTSTRTWALPTYNNHLYKQISSASTGASNDNHYFGYSTPWGYFDFNRFHCHFSPRDWQRLINNNWGFRPKRLNFKLFNIQVKEVTTNDGVTTIANNLTSTVQVFSDSEYQLPYVLGSAHQGCLPPFPADVFMIPQYGYLTLNNGSQAVGRSSFYCLEYFPSQMLRTGNNFTFSYTFEDVPFHSSYAHSQSLDRLMNPLIDQYLYYLNRTQNQSGSAQNKDLLFSRGSPTGMSVQPKNWLPGPCYRQQRVSKTKTDNNNSNFTWTGASKYNLNGRESIINPGTAMASHKDDEDKFFPMSGVMIFGKESAGASNTALDNVMITDEEEIKATNPVATERFGTVAVNLQSSSTDPATGDVHAMGALPGMVWQDRDVYLQGPIWAKIPHTDGHFHPSPLMGGFGLKHPPPQILIKNTPVPANPPAEFSATKFASFITQYSTGQVSVEIEWELQKENSKRWNPEVQYTSNYAKSANVDFTVDNNGLYTEPRPIGTRYLTRPL

SEQ ID NO: 558 - DNA, 2208 bp, Artificial Sequence
  Description of Artificial Sequence: Synthetic polynucleotide
  modified_base (955)..(955): n = a, c, t, or g
  misc_feature (955)..(955): n is a, c, g, or t
  modified_base (971)..(972): n = a, c, t, or g
  misc_feature (971)..(972): n is a, c, g, or t
  modified_base (981)..(981): n = a, c, t, or g
  misc_feature (981)..(981): n is a, c, g, or t
  modified_base (986)..(986): n = a, c, t, or g
  misc_feature (986)..(986): n is a, c, g, or t
  modified_base (1235)..(1235): n = a, c, t, or g
  misc_feature (1235)..(1235): n is a, c, g, or t
  modified_base (1694)..(1696): n = a, c, t, or g
  misc_feature (1694)..(1696): n is a, c, g, or t
  modified_base (1698)..(1698): n = a, c, t, or g
  misc_feature (1698)..(1698): n is a, c, g, or t
  modified_base (1763)..(1765): n = a, c, t, or g
  misc_feature (1763)..(1765): n is a, c, g, or t
  modified_base (1778)..(1778): n = a, c, t, or g
  misc_feature (1778)..(1778): n is a, c, g, or t
  modified_base (2204)..(2204): n = a, c, t, or g
  misc_feature (2204)..(2204): n is a, c, g, or t
atggctgccgatggttatcttccagattggctcgaggacaacctctctgagggcattcgcgaatggtgggacttgaaacctggagccccgaaacccaaagtcaaccagcaaaagcaggacaacgctcggggtcttgtgcttccgggttacaaatacctcggacccttcaacggactcgacaagggggagcccgtcaacgcggcggacgcagcggccctcgagcacgacaaggcctacgaccagcagctcaaagcgggtgacaatccgtaccttcggtataaccacgccgacgccgagtttcaggagcgtctgcaagaagatacgtcttttgggggcaaccttggacgagcagtcttccaggccaagaagagggttctcgaaccttttggtctggttgaggaaggtgctaagacggctcctggaaagaaacgtccggtagagcagtcgccacaagagccagactcctcctcgggcattggcaagacaggccagcagcccgctaaaaagagactcaattttggtcagactggcgactcagagtcagtccccgacccacaacctctcggagaacctccagcaacccccgctgctgtgggacctactacaatggcttcaggcggtggcgcaccaatggcagacaataacgaaggcgccgacggagtgggtaatgcctcaggaaattggcattgcgattccacatggctgggcgacagagtcatcaccaccagcacccgaacatgggccttgcccacctataacaaccacctctacaagcaaatctccagtgcttcaacgggggccagcaacgacaaccactacttcggctacagcaccccctgggggtattttgatttcaacagattccactgccacttttcaccacgtgactggcagcgactcatcaataacaattggggattccggcccaagagactcaacttcaaactcttcaacntccaagtcaaggaggnnacgacgaangatgncgtcacaaccatcgctaataaccttaccagcacggttcaagtcttctcggactcggagtaccagcttccgtacgtcctcggctctgcgcaccagggctgcctccctccgttcccggcggacgtgttcatgattccgcaatacggctacctgacgctcaacaatggcagccaggcagtgggacggtcatccttttactgcctggaatatttcccatcgcagatgctgagaacgggcaataactttacctncagctacacttttgaggacgttcctttccacagcagctacgctcacagccagagcctggaccggctgatgaatcctctcatcgaccagtacctgtattacctgaacagaactcagaatcagtccggaagtgcccaaaacaaggacttgctgtttagccgtgggtctccaactggcatgtctgttcagcccaaaaactggctacctggaccctgttatcggcagcagcgcgtttctaaaacaaaaacagacaacaacaacagcaactttacctggactggtgcttcaaaatataaccttaatgggcgtgaatctataatcaaccctggcactgctatggcctcacacaaagacgacgaagacaagttctttcccatgagcggtgtcatgatttttggaaaggagagcgccggagcttcaaacactgcattggacaatgtcatgatcacagacgaagagannncnaagccactaaccccgtggccactgaaagatttgggactgtggcagtcaatctccaagcagcacannnaccctgcgaccgnagatgtgcatgccatgggagccttacctggaatggtgtggcaagacagagacgtatacctgcagggtcctatttgggccaaaattcctcacacggatggacactttcacccgtctcctctcatgggcggctttggacttaagcacccgcctcctcagatcctcatcaaaaacacgcctgttcctgcgaatcctccggcagagttttcggctacaaagtttgcttcattcatcacccagtattccacaggacaagtgagcgtggagattgaatgggagctgcagaaagaaaacagcaaacgctggaatcccgaagtgcagtatacatctaactatgcaaaatctgccaacgttgatttcactgtggacaacaatggactttatactgagcctcgccccattggcacccgttacctcacccgtccccngtaa

SEQ ID NO: 559 - protein, 723 aa, Artificial Sequence
  Description of Artificial Sequence: Synthetic polypeptide
MAADGYLPDWLEDNLSEGIREWWDLKPGAPKPKVNQQKQDNARGLVLPGYKYLGPFNGLDKGEPVNAADAAALEHDKAYDQQLKAGDNPYLRYNHADAEFQERLQEDTSFGGNLGRAVFQAKKRVLEPFGLVEEGAKTAPGKKRPVEQSPQEPDSSSGIGKTGQQPAKKRLNFGQTGDSESVPDPQPLGEPPATPAAVGPTTMASGGGAPMADNNEGADGVGNASGNWHCDSTWLGDRVITTSTRTWALPTYNNHLYKQISSASTGASNDNHYFGYSTPWGYFDFNRFHCHFSPRDWQRLINNNWGFRPKRLNFKLFNQVKETTDVTTIANNLTSTVQVFSDSEYQLPYVLGSAHQGCLPPFPADVFMIPQYGYLTLNNGSQAVGRSSFYCLEYFPSQMLRTGNNFTSYTFEDVPFHSSYAHSQSLDRLMNPLIDQYLYYLNRTQNQSGSAQNKDLLFSRGSPTGMSVQPKNWLPGPCYRQQRVSKTKTDNNNSNFTWTGASKYNLNGRESIINPGTAMASHKDDEDKFFPMSGVMIFGKESAGASNTALDNVMITDEEATNPVATERFGTVAVNLQSSPATDVHAMGALPGMVWQDRDVYLQGPIWAKIPHTDGHFHPSPLMGGFGLKHPPPQILIKNTPVPANPPAEFSATKFASFITQYSTGQVSVEIEWELQKENSKRWNPEVQYTSNYAKSANVDFTVDNNGLYTEPRPIGTRYLTRP

SEQ ID NO: 560 - DNA, 2208 bp, Artificial Sequence
  Description of Artificial Sequence: Synthetic polynucleotide
atggctgccgatggttatcttccagattggctcgaggacactctctctgaaggaataagacagtggtggaagctcaaacctggcccaccaccaccaaagcccgcagagcggcataaggacgacagcaggggtcttgtgcttcctgggtacaagtacctcggacccttcaacggactcgacaagggagagccggtcaacgaggcagacgccgcggccctcgagcacgacaaagcctatgaccggcagctcgacagcggagacaacccgtacctcaagtacaaccacgccgacgcggagtttcaggagcgccttaaagaagatacgtcttttgggggcaacctcggacgagcagtcttccaggcgaaaaagagggttcttgaacctctgggcctggttgaggaacctgttaagacggctccgggaaaaaagaggccggtagagcactctcctgtggagccagactcctcctcgggaaccggaaaggcgggtcagcagcctgcaagaaaaagattgaattttggtcagactggagacgcagactcagtacctgacccccagcctctcggacagccaccagcagccccctctggtctgggaactaatacgatggctacaggcagtggcgcaccaatggcagacaataacgagggcgccgacggagtgggtaattcctcgggaaattggcattgcgattccacatggatgggcgacagagtcatcaccaccagcacccgaacctgggccctgcccacctacaacaaccacctctacaaacaaatttccagccaatcaggagcctcgaacgacaatcactactttggctacagcaccccttgggggtattttgacttcaacagattccactgccacttttcaccacgtgactggcaaagactcatcaacaacaactggggattccgacccaagagactcaagttcaagctctttaacattcaagtcaaagaggtcacgcagaatgacggtacgacgacgattgccaataaccttaccagcacggttcaggtgtttactgactcggagtaccagctcccgtacgtcctcggctcggcgcatcaaggatgcctcccgccgttcccagcagacgtcttcatggtgccacagtatggatacctcaccctgaacaacgggagtcaggcagtaggacgctcttcattttactgcctggagtactttccttctcagatgctgcgtaccggtaacaactttaccttcagctacacttttgaggacgttcctttccacagcagctacgctcacagccagagtctggaccgtctcatgaatcctctcatcgaccagtacctgtattacttgagcagaacagacgctccaagtggaaccaccacgcagtcaaggcttcagttttctcaggccggagcgagtgacattcgggaccagtctaggaactggcttcctggaccctgttaccgccagcagcgagtatcaaagacatctgcggataacaacaacagtgaatactcgtggactggagctaccaagtaccacctcaatggcagagactctctggtgaatccgggcccggccatggcaagccacaaggacgatgaagaaaagttttttcctcagagcggggttctcatctttgggaagcaaggctcagagaaaacaagtgtggacattgaaaaggtcatgattacagacgaagaggaaatcaggacaaccaatcccgtggctacggagcagtatggttctgtatctaccaacctccagagaggcaacagacaagcagctaccgcagatgtcaacacacaaggcgttcttccaggcatggtctggcaggacagagatgtgtaccttcaggggcccatctgggcaaagattccacacacggacggacattttcacccctctcccctcatgggtggattcggacttaaacaccctcctccacagattctcatcaagaacaccccggtacctgcgaatccttcgaccaccttcagtgcggcaaagtttgcttccttcatcacacagtactccacgggacaggtcagcgtggagatcgagtgggagctgcagaaggaaaacagcaaacgctggaatcccgaagttcagtacacttccaactacaacaagtctgttaatgtggactttactgtggacactaatggcgtgtattcagagcctcgccccattggcaccagatacctgactcgtaatctgtaa

SEQ ID NO: 561 - protein, 735 aa, Artificial Sequence
  Description of Artificial Sequence: Synthetic polypeptide
MAADGYLPDWLEDTLSEGIRQWWKLKPGPPPPKPAERHKDDSRGLVLPGYKYLGPFNGLDKGEPVNEADAAALEHDKAYDRQLDSGDNPYLKYNHADAEFQERLKEDTSFGGNLGRAVFQAKKRVLEPLGLVEEPVKTAPGKKRPVEHSPVEPDSSSGTGKAGQQPARKRLNFGQTGDADSVPDPQPLGQPPAAPSGLGTNTMATGSGAPMADNNEGADGVGNSSGNWHCDSTWMGDRVITTSTRTWALPTYNNHLYKQISSQSGASNDNHYFGYSTPWGYFDFNRFHCHFSPRDWQRLINNNWGFRPKRLKFKLFNIQVKEVTQNDGTTTIANNLTSTVQVFTDSEYQLPYVLGSAHQGCLPPFPADVFMVPQYGYLTLNNGSQAVGRSSFYCLEYFPSQMLRTGNNFTFSYTFEDVPFHSSYAHSQSLDRLMNPLIDQYLYYLSRTDAPSGTTTQSRLQFSQAGASDIRDQSRNWLPGPCYRQQRVSKTSADNNNSEYSWTGATKYHLNGRDSLVNPGPAMASHKDDEEKFFPQSGVLIFGKQGSEKTSVDIEKVMITDEEEIRTTNPVATEQYGSVSTNLQRGNRQAATADVNTQGVLPGMVWQDRDVYLQGPIWAKIPHTDGHFHPSPLMGGFGLKHPPPQILIKNTPVPANPSTTFSAAKFASFITQYSTGQVSVEIEWELQKENSKRWNPEVQYTSNYNKSVNVDFTVDTNGVYSEPRPIGTRYLTRNL

SEQ ID NO: 562 - DNA, 2208 bp, Artificial Sequence
  Description of Artificial Sequence: Synthetic polynucleotide
atggctgccgatggttatcttccagattggctcgaggacactctctctgaaggaataagacagtggtggaagctcaaacctggcccaccaccaccaaagcccgcagagcggcataaggacgacagcaggggtcttgtgcttcctgggtacaagtacctcggacccttcaacggactcgacaagggagagccggtcaacgaggcagacgccgcggccctcgagcacgacaaagcctatgaccggcagctcgacagcggagacaacccgtacctcaagtacaaccacgccgacgcggagtttcaggagcgccttaaagaagatacgtcttttgggggcaacctcggacgagcagtcttccaggcgaaaaagagggttcttgaacctctgggcctggttgaggaacctgttaagacggctccgggaaaaaagaggccggtagagcactctcctgtggagccagactcctcctcgggaaccggaaaggcgggccagcagcctgcaagaaaaagattgaattttggtcagactggagacgcaaactcagtacctgacccccagcctctcggacagccaccagcagccccctctggtctgggaactaatacgatggctacaggcagtggcgcaccaatggcagacaataacgagggcgccgacggagtgggtaattcctcgggaaattggcattgcgattccacatggatgggcgacagagtcatcaccaccagcacccgaacctgggccctgcccacctacaacaaccacctctacaaacaaatttccagccaatcaggagcctcgaacgacaatcactactttggctacagcaccccttgggggtattttgacttcaacagattccactgccacttttcaccacgtgactggcaaagactcatcaacaacaactggggattccgacccaagagactcaagttcaagctctttaacattcaagtcaaagaggtcacgcagaatgacggtacgacgacgattgccaataaccttaccagcacggttcaggtgtttactgactcggagtaccagctcccgtacgtcctcggctcggcgcatcaaggatgcctcccgccgttcccagcagacgtcttcatggtgccacagtatggatacctcaccctgaacaacgggagtcgggcagtaggacgctcttcattttactgcctggagtactttccttctcagatgctgcgtaccggtaacaactttaccttcagctacacttttgaggacgttcctttccacagcagctacgctcacagccagagtctggaccgtctcatgaatcctctcatcgaccagtacctgtattacttgagcagaacagacactccaagtggaaccaccacgcagtcaaggcttcagttttctcaggccggagcgagtgacattcgggaccagtctaggaactggcttcctggaccctgttaccgccagcagcgagtatcaaagacatctgcggataacaacaacagtgaatactcgtggactggagctaccaagtaccacctcaatggcagagactctctggtgaatccgggcccggccatggcaagccacaaggacgatgaagaaaagttttttcctcagagcggggttctcatctttgggaagcaaggctcagagaaaacaagtgtggacattgaaaaggtcatgattacagacgaagaggaaatcaggacgaccaatcccgtggctacggagcagtatggttctgtatctaccaacctccagagaggcaacagacaagcagctaccgcagatgtcaacacacaaggcgttcttccaggcatggtctggcaggacagagatgtgtaccttcaggggcccatctgggcaaagattccacacacggacggacattttcacccctctcccctcatgggtggattcggacttaaacaccctcctccacagattctcatcaagaacaccccggtacctgcgaatccttcgaccaccttcagtgcggcaaagtttgcttccttcatcacacagtactccacgggacaggtcagcgtggagatcgagtgggagctgcagaaggaaaacagcaaacgctggaatcccgaagttcagtacacttccaactacaacaagtctgttaatgtggactttactgtggacactaatggcgtgtatacagagcctcgccccattggcaccagatacctgactcgtaatctgtaa

SEQ ID NO: 563 - protein, 735 aa, Artificial Sequence
  Description of Artificial Sequence: Synthetic polypeptide
MAADGYLPDWLEDTLSEGIRQWWKLKPGPPPPKPAERHKDDSRGLVLPGYKYLGPFNGLDKGEPVNEADAAALEHDKAYDRQLDSGDNPYLKYNHADAEFQERLKEDTSFGGNLGRAVFQAKKRVLEPLGLVEEPVKTAPGKKRPVEHSPVEPDSSSGTGKAGQQPARKRLNFGQTGDANSVPDPQPLGQPPAAPSGLGTNTMATGSGAPMADNNEGADGVGNSSGNWHCDSTWMGDRVITTSTRTWALPTYNNHLYKQISSQSGASNDNHYFGYSTPWGYFDFNRFHCHFSPRDWQRLINNNWGFRPKRLKFKLFNIQVKEVTQNDGTTTIANNLTSTVQVFTDSEYQLPYVLGSAHQGCLPPFPADVFMVPQYGYLTLNNGSRAVGRSSFYCLEYFPSQMLRTGNNFTFSYTFEDVPFHSSYAHSQSLDRLMNPLIDQYLYYLSRTDTPSGTTTQSRLQFSQAGASDIRDQSRNWLPGPCYRQQRVSKTSADNNNSEYSWTGATKYHLNGRDSLVNPGPAMASHKDDEEKFFPQSGVLIFGKQGSEKTSVDIEKVMITDEEEIRTTNPVATEQYGSVSTNLQRGNRQAATADVNTQGVLPGMVWQDRDVYLQGPIWAKIPHTDGHFHPSPLMGGFGLKHPPPQILIKNTPVPANPSTTFSAAKFASFITQYSTGQVSVEIEWELQKENSKRWNPEVQYTSNYNKSVNVDFTVDTNGVYTEPRPIGTRYLTRNL

SEQ ID NO: 564 - DNA, 2211 bp, Artificial Sequence
  Description of Artificial Sequence: Synthetic polynucleotide
atggctgccgatggttatcttccagattggctcgaggacactctctctgaaggaataagacagtggtggaagctcaaacctggcccaccaccaccaaagcccgcagagcggcataaggacgacagcaggggtcttgtgcttcctgggtacaagtacctcggacccttcaacggactcgacaagggagagccggtcaacgaggcagacgccgcggccctcgagcacgacaaggcctacgaccagcagctcaaagcgggtgacaatccgtacctgcggtataaccacgccgacgccgagtttcaggagcgtctgcaagaagatacgtcttttgggggcaacctcgggcgagcagtcttccaggccaagaagcgggttctcgaacctctcggtctggttgaggaaggcgctaagacggctcctggaaagaaacgtccggtagagcagtcgccacaagagccagactcctcctcgggcatcggcaagacaggccagcagcccgctaaaaagagactcaattttggtcagactggcgactcagagtcagtccccgacccacaacctctcggagaacctccagcaacccccgctgctgtgggacctactacaatggcttcaggcggtggcgcaccaatggcagacaataacgaaggcgccgacggagtgggtaatgcctcaggaaattggcattgcgattccacatggctgggcgacagagtcatcaccaccagcacccgaacatgggccttgcccacctataacaaccacctctacaagcaaatctccagtgcttcgacgggggccagcaacgacaaccactacttcggctacagcaccccctgggggtattttgactttaacagattccactgccacttttcaccacgtgactggcagcgactcatcaacaataactggggattccggcccaagagactcagcttcaagctcttcaacatccaggtcaaggaggtcacgacgaatgatggcgtcacaaccatcgctaataaccttaccagcacggttcaagtcttctcggactcggagtaccagcttccgtacgtcctcggctctgcgcaccagggctgcctccctccgttcccggcggacgtgttcatgattccgcaatacggctacctgacgctcaacaatggcagccaagccgtgggacgttcatccttttactgcctggaatatttcccttctcagatgctgagaacgggcaacaactttaccttcagctacacctttgaggaagtgcctttccacagcagctacgcgcacagccagagcctggaccggctgatgaatcctctcatcgatcaatacctgtattacctgaacagaactcaaaatcagtccggaagtgcccaaaacaaggacttgctgtttagccgtgggtctccagctggcatgtctgttcagcccaaaaactggctacctggaccctgttatcggcagcagcgcgtttctaaaacaaaaacagacaacaacaacagcaattttacctggactggtgcttcaaaatataacctcaatgggcgtgaatccatcatcaaccctggcactgctatggcctcacacaaagacgacgaagacaagttctttcccatgagcggtgtcatgatttttggaaaagagagcgccggagcttcaaacactgcattggacaatgtcatgattacggacgaagaggaaattaaagccactaaccctgtggccaccgaaagatttgggaccgtggcagtcaatttccagagcagcagcacagaccctgcgaccggagatgtgcatgctatgggagcattacctggcatggtgtggcaagatagagacgtgtacctgcagggtcccatttgggccaaaattcctcacacagatggacactttcacccgtctcctcttatgggcggctttggactcaagaacccgcctcctcagatcctcatcaaaaacacgcctgttcctgcgaatcctccggcggagttttcagctacaaagtttgcttcattcatcactcaatactccacaggacaagtgagcgtggaaattgaatgggagctgcagaaagaaaacagcaaacgctggaatcccgaagtgcagtatacatctaactatgcaaaatctgccaacgttgatttcactgtggacaacaatggactttatactgagcctcgccccattggcacccgttacctcacccgtcccctgtaa

SEQ ID NO: 565 - protein, 736 aa, Artificial Sequence
  Description of Artificial Sequence: Synthetic polypeptide
MAADGYLPDWLEDTLSEGIRQWWKLKPGPPPPKPAERHKDDSRGLVLPGYKYLGPFNGLDKGEPVNEADAAALEHDKAYDQQLKAGDNPYLRYNHADAEFQERLQEDTSFGGNLGRAVFQAKKRVLEPLGLVEEGAKTAPGKKRPVEQSPQEPDSSSGIGKTGQQPAKKRLNFGQTGDSESVPDPQPLGEPPATPAAVGPTTMASGGGAPMADNNEGADGVGNASGNWHCDSTWLGDRVITTSTRTWALPTYNNHLYKQISSASTGASNDNHYFGYSTPWGYFDFNRFHCHFSPRDWQRLINNNWGFRPKRLSFKLFNIQVKEVTTNDGVTTIANNLTSTVQVFSDSEYQLPYVLGSAHQGCLPPFPADVFMIPQYGYLTLNNGSQAVGRSSFYCLEYFPSQMLRTGNNFTFSYTFEEVPFHSSYAHSQSLDRLMNPLIDQYLYYLNRTQNQSGSAQNKDLLFSRGSPAGMSVQPKNWLPGPCYRQQRVSKTKTDNNNSNFTWTGASKYNLNGRESIINPGTAMASHKDDEDKFFPMSGVMIFGKESAGASNTALDNVMITDEEEIKATNPVATERFGTVAVNFQSSSTDPATGDVHAMGALPGMVWQDRDVYLQGPIWAKIPHTDGHFHPSPLMGGFGLKNPPPQILIKNTPVPANPPAEFSATKFASFITQYSTGQVSVEIEWELQKENSKRWNPEVQYTSNYAKSANVDFTVDNNGLYTEPRPIGTRYLTRPL

SEQ ID NO: 566 - protein, 735 aa, Artificial Sequence
  Description of Artificial Sequence: Synthetic polypeptide
MAADGYLPDWLEDTLSEGIRQWWKLKPGPPPPKPAERHKDDSRGLVLPGYKYLGPFNGLDKGEPVNEADAAALEHDKAYDRQLDSGDNPYLKYNHADAEFQERLKEDTSFGGNLGRAVFQAKKRVLEPLGLVEEPVKTAPGKKRPVEHSPVEPDSSSGTGKAGQQPARKRLNFGQTGDADSVPDPQPLGQPPAAPSGLGTNTMATGSGAPMADNNEGADGVGNSSGNWHCDSTWMGDRVITTSTRTWALPTYNNHLYKQISSQSGASNDNHYFGYSTPWGYFDFNRFHCHFSPRDWQRLINNNWGFRPKRLKFKLFNIQVKEVTQNDGTTTIANNLTSTVQVFTDSEYQLPYVLGSAHQGCLPPFPADVFMVPQYGYLTLNNGSQAVGRSSFYCLEYFPSQMLRTGNNFTFSYTFEDVPFHSSYAHSQSLDRLMNPLIDQYLYYLSRTDTPSGTTTQSRLQFSQAGASDIRNQSRNWLPGPCYRQQRVSKTSADNNNSEYSWTGATKYHLNGRDSLVNPGPAMASHKDDEEKFFPQSGVLIFGKQGSEKTSVDIEKVMITDEEEIRTTNPVATEQYGSVSTNLQRGNRQAATADVNTQGVLPGMVWQDRDVYLQGPIWAKIPHTDGHFHPSPLMGGFGLKHPPPQILIKNTPVPANPSTTFSAAKFASFITQYSTGQVSVEIEWELQKENSKRWNPEVQYTSNYNKSVNVDFTVDTNGVYSEPRPIGTRYLTRNQ

SEQ ID NO: 567 - DNA, 2208 bp, Artificial Sequence
  Description of Artificial Sequence: Synthetic polynucleotide
atggctgccgatggttatcttccagattggctcgaggacactctctctgaaggaataagacagtggtggaagctcaaacctggcccaccaccaccaaagcccgcagagcggcataaggacgacagcaggggtcttgtgcttcctgggtacaagtacctcggacccttcaacggactcgacaagggagagccggtcaacgaggcagacgccgcggccctcgagcacgacaaagcctatgaccggcagctcgacagcggagacaacccgtacctcaagtacaaccacgccgacgcggagtttcaggaacgccttaaagaagatacgtcttttgggggcaacctcggacgagcagtcttccaggcgaaaaagagggttcttgaacctctgggcctggttgaggaacctgttaagacggctccgggaaaaaagaggccggtagagcactctcctgtggagccagactcctcctcgggaaccggaaaggcgggccagcagcctgcaagaaaaagattgaattttggtcagactggagacgcagactcagtacctgacccccagcctctcggacagccaccagcagccccctctggtctgggaactaatacgatggctacaggcagtggcgcaccaatggcagacaataacgagggcgccgacggagtgggtaattcctcgggaaattggcattgcgattccacatggatgggcgacagagtcatcaccaccagcacccgaacctgggccctgcccacctacaacaaccacctctacaaacaaatttccagccaatcaggagcctcgaacgacaatcactactttggctacagcaccccttgggggtattttgacttcaacagattccactgccacttttcaccacgtgactggcaaagactcatcaacaacaactggggattccgacccaagagactcaagttcaagctctttaacattcaagtcaaagaggtcacgcagaatgacggtacgacgacgattgccaataaccttaccagcacggttcaggtgtttactgactcggagtaccagctcccgtacgtcctcggctcggcgcatcaaggatgcctcccgccgttcccagcagacgtcttcatggtgccacagtatggatacctcaccctgaacaacgggagtcaggcagtaggacgctcttcattttactgcctggagtactttccttctcagatgctgcgtaccggtaacaactttaccttcagctacacttttgaggacgttcctttccacagcagctacgctcacagccagagtctggaccgtctcatgaatcctctcatcgaccagtacctgtattacttgagcagaacagacactccaagtggaaccaccacgcagtcaaggcttcagttttctcaggccggagcgagtgacattcggaaccagtctaggaactggcttcctggaccctgttaccgccagcagcgagtatcaaagacatctgcggataacaacaacagtgaatactcgtggactggagctaccaagtaccacctcaatggcagagactctctggtgaatccgggcccggccatggcaagccacaaggacgatgaagaaaagttttttcctcagagcggggttctcatctttgggaagcaaggctcagagaaaacaagtgtggacattgaaaaggtcatgattacagacgaagaggaaatcaggacaaccaatcccgtggctacggagcagtatggttctgtatctaccaacctccagagaggcaacagacaagcagctaccgcagatgtcaacacacaaggcgttcttccaggcatggtctggcaggacagagatgtgtaccttcaggggcccatctgggcaaagattccacacacggacggacattttcacccctctcccctcatgggtggattcggacttaaacaccctcctccacagattctcatcaagaacaccccggtacctgcgaatccttcgaccaccttcagtgcggcaaagtttgcttccttcatcacacagtactccacgggacaggtcagcgtggagatcgagtgggagctgcagaaggaaaacagcaaacgctggaatcccgaagttcagtacacttccaactacaacaagtctgttaatgtggactttactgtggacactaatggcgtgtattcagagcctcgccccattggcaccagatacctgactcgtaatcagtaa

SEQ ID NO: 568 - DNA, 2208 bp, Artificial Sequence
  Description of Artificial Sequence: Synthetic polynucleotide
atggctgccgatggttatcttccagattggctcgaggacactctctctgaaggaataagacagtggtggaagctcaaacctggcccaccaccaccaaagcccgcagagcggcataaggacgacagcaggggtcttgtgcttcctgggtacaagtacctcggacccttcaacggactcgacaagggagagccggtcaacgaggcagacgccgcggccctcgagcacgacaaagcctatgaccggcagctcgacagcggagacaacccgtacctcaagtacaaccacgccgacgcggagtttcaggagcgccttaaagaagatacgtcttttgggggcaacctcggacgagcagtcttccaggcgaaaaagagggttcttgaacctctgggcctggttgaggaacctgttaagacggctccgggaaaaaagaggccggtagagcactctcctgtggagccagactcctcctcgggaaccggaaaggcgggccagcagcctgcaagaaaaagattgaattttggtcagactggagacgcagactcagtacctgatccccagcctctcggacagccaccagcagccccctctggtctgggaactaatacgatggctacaggcagtggcgcaccaatggcagacaataacgagggcgccgacggagtgggtaattcctcgggaaattggcattgcgattccacatggatgggcgacagagtcatcaccaccagcacccgaacctgggccctgcccacctacaacaaccacctctacaaacaaatttccagccaatcaggagcctcgaacgacaatcactactttggctacagcaccccttgggggtattttgacttcaacagattccactgccacttttcaccacgtgactggcaaagactcatcaacaacaactggggattccgacccaagagactcaagttcaagctctttaacattcaagtcaaagaggtcacgcagaatgacggtacgacgacgattgccaataaccttaccagcacggttcaggtgtttactgactcggagtaccagctcccgtatgtcctcggctcggcgcatcaaggatgcctcccgccgttcccagcagacgtcttcatggtgccacagtatggatacctcaccctgaacaacgggagtcaggcagtaggacgctcttcattttactgcctggagtactttccttctcagatgctgcgtaccggtaacaactttaccttcagctacacttttgaggacgttcctttccacagcagctacgctcacagccagagtctggaccgtctcatgaatcctctcatcgaccagtacctgtattacttgagcagaacagacactccaagtggaaccaccacgcagtcaaggcttcagttttctcaggccggagcgagtgacattcgggaccagtctaggaactggcttcctggaccctgttaccgccagcagcgagtatcaaagacatctgcggataacaacaacagtgaatactcgtggactggagctaccaagtaccacctcaatggcagagactctctggtgaatccgggcccggccatggcaagccacaaggacgatgaagaaaagttttttcctcagagcggggttctcatctttgggaagcaaggctcagagaaaacaagtgtggacattgaaaaggtcatgattacagacgaagaggaaatcaggacaaccaatcccgtggctacggagcagtatggttctgtatctaccaacctccagagaggcaacagacaagcagctaccgcagatgtcaacacacaaggcgttcttccaggcatggtctggcaggacagagatgtgtaccttcaggggcccatctgggcaaagattccacacacggacggacattttcacccctctcccctcatgggtggattcggacttaaacaccctcctccacagattctcatcaagaacaccccggtacctgcgaatccttcgaccaccttcagtgcggcaaagtttgcttccttcatcacacagtactccacgggacaggtcagcgtggagatcgagtgggagctgcagaaggaaaacagcaaacgctggaatcccgaagttcagtacacttccaactacaacaagtctgttaatgtggactttactgtggacactaatggcgtgtattcagagcctcgccccattggcaccagatacctgactcgtaatctgtaa

SEQ ID NO: 569 - protein, 735 aa, Artificial Sequence
  Description of Artificial Sequence: Synthetic polypeptide
MAADGYLPDWLEDTLSEGIRQWWKLKPGPPPPKPAERHKDDSRGLVLPGYKYLGPFNGLDKGEPVNEADAAALEHDKAYDRQLDSGDNPYLKYNHADAEFQERLKEDTSFGGNLGRAVFQAKKRVLEPLGLVEEPVKTAPGKKRPVEHSPVEPDSSSGTGKAGQQPARKRLNFGQTGDADSVPDPQPLGQPPAAPSGLGTNTMATGSGAPMADNNEGADGVGNSSGNWHCDSTWMGDRVITTSTRTWALPTYNNHLYKQISSQSGASNDNHYFGYSTPWGYFDFNRFHCHFSPRDWQRLINNNWGFRPKRLKFKLFNIQVKEVTQNDGTTTIANNLTSTVQVFTDSEYQLPYVLGSAHQGCLPPFPADVFMVPQYGYLTLNNGSQAVGRSSFYCLEYFPSQMLRTGNNFTFSYTFEDVPFHSSYAHSQSLDRLMNPLIDQYLYYLSRTDTPSGTTTQSRLQFSQAGASDIRDQSRNWLPGPCYRQQRVSKTSADNNNSEYSWTGATKYHLNGRDSLVNPGPAMASHKDDEEKFFPQSGVLIFGKQGSEKTSVDIEKVMITDEEEIRTTNPVATEQYGSVSTNLQRGNRQAATADVNTQGVLPGMVWQDRDVYLQGPIWAKIPHTDGHFHPSPLMGGFGLKHPPPQILIKNTPVPANPSTTFSAAKFASFITQYSTGQVSVEIEWELQKENSKRWNPEVQYTSNYNKSVNVDFTVDTNGVYSEPRPIGTRYLTRNL

SEQ ID NO: 570 - DNA, 18 bp, Unknown
  Description of unknown: Recognition Site
tagggataacagggtaat

SEQ ID NO: 571 - protein, 1388 aa, Streptococcus thermophilus (strain ATCC BAA-491 / LMD-9)
MTKPYSIGLDIGTNSVGWAVTTDNYKVPSKKMKVLGNTSKKYIKKNLLGVLLFDSGITAEGRRLKRTARRRYTRRRNRILYLQEIFSTEMATLDDAFFQRLDDSFLVPDDKRDSKYPIFGNLVEEKAYHDEFPTIYHLRKYLADSTKKADLRLVYLALAHMIKYRGHFLIEGEFNSKNNDIQKNFQDFLDTYNAIFESDLSLENSKQLEEIVKDKISKLEKKDRILKLFPGEKNSGIFSEFLKLIVGNQADFRKCFNLDEKASLHFSKESYDEDLETLLGYIGDDYSDVFLKAKKLYDAILLSGFLTVTDNETEAPLSSAMIKRYNEHKEDLALLKEYIRNISLKTYNEVFKDDTKNGYAGYIDGKTNQEDFYVYLKKLLAEFEGADYFLEKIDREDFLRKQRTFDNGSIPYQIHLQEMRAILDKQAKFYPFLAKNKERIEKILTFRIPYYVGPLARGNSDFAWSIRKRNEKITPWNFEDVIDKESSAEAFINRMTSFDLYLPEEKVLPKHSLLYETFNVYNELTKVRFIAESMRDYQFLDSKQKKDIVRLYFKDKRKVTDKDIIEYLHAIYGYDGIELKGIEKQFNSSLSTYHDLLNIINDKEFLDDSSNEAIIEEIIHTLTIFEDREMIKQRLSKFENIFDKSVLKKLSRRHYTGWGKLSAKLINGIRDEKSGNTILDYLIDDGISNRNFMQLIHDDALSFKKKIQKAQIIGDEDKGNIKEVVKSLPGSPAIKKGILQSIKIVDELVKVMGGRKPESIVVEMARENQYTNQGKSNSQQRLKRLEKSLKELGSKILKENIPAKLSKIDNNALQNDRLYLYYLQNGKDMYTGDDLDIDRLSNYDIDHIIPQAFLKDNSIDNKVLVSSASNRGKSDDVPSLEVVKKRKTFWYQLLKSKLISQRKFDNLTKAERGGLSPEDKAGFIQRQLVETRQITKHVARLLDEKFNNKKDENNRAVRTVKIITLKSTLVSQFRKDFELYKVREINDFHHAHDAYLNAVVASALLKKYPKLEPEFVYGDYPKYNSFRERKSATEKVYFYSNIMNIFKKSISLADGRVIERPLIEVNEETGESVWNKESDLATVRRVLSYPQVNVVKKVEEQNHGLDRGKPKGLFNANLSSKPKPNSNENLVGAKEYLDPKKYGGYAGISNSFTVLVKGTIEKGAKKKITNVLEFQGISILDRINYRKDKLNFLLEKGYKDIELIIELPKYSLFELSDGSRRMLASILSTNNKRGEIHKGNQIFLSQKFVKLLYHAKRISNTINENHRKYVENHKKEFEELFYYILEFNENYVGAKKNGKLLNSAFQSWQNHSIDELCSSFIGPTGSERKGLFELTSRGSAADFEFLGVKIPRYRDYTPSSLLKDATLIHQSVTGLYETRIDLAKLGEG

SEQ ID NO: 572 - protein, 1368 aa, Streptococcus pyogenes serotype M1 [sequence omitted]

SEQ ID NO: 573 - protein, 1409 aa, Streptococcus thermophilus
MLFNKCIIISINLDFSNKEKCMTKPYSIGLDIGTNSVGWAVITDNYKVPSKKMKVLGNTSKKYIKKNLLGVLLFDSGITAEGRRLKRTARRRYTRRRNRILYLQEIFSTEMATLDDAFFQRLDDSFLVPDDKRDSKYPIFGNLVEEKVYHDEFPTIYHLRKYLADSTKKADLRLVYLALAHMIKYRGHFLIEGEFNSKNNDIQKNFQDFLDTYNAIFESDLSLENSKQLEEIVKDKISKLEKKDRILKLFPGEKNSGIFSEFLKLIVGNQADFRKCFNLDEKASLHFSKESYDEDLETLLGYIGDDYSDVFLKAKKLYDAILLSGFLTVTDNETEAPLSSAMIKRYNEHKEDLALLKEYIRNISLKTYNEVFKDDTKNGYAGYIDGKTNQEDFYVYLKNLLAEFEGADYFLEKIDREDFLRKQRTFDNGSIPYQIHLQEMRAILDKQAKFYPFLAKNKERIEKILTFRIPYYVGPLARGNSDFAWSIRKRNEKITPWNFEDVIDKESSAEAFINRMTSFDLYLPEEKVLPKHSLLYETFNVYNELTKVRFIAESMRDYQFLDSKQKKDIVRLYFKDKRKVTDKDIIEYLHAIYGYDGIELKGIEKQFNSSLSTYHDLLNIINDKEFLDDSSNEAIIEEIIHTLTIFEDREMIKQRLSKFENIFDKSVLKKLSRRHYTGWGKLSAKLINGIRDEKSGNTILDYLIDDGISNRNFMQLIHDDALSFKKKIQKAQIIGDEDKGNIKEVVKSLPGSPAIKKGILQSIKIVDELVKVMGGRKPESIVVEMARENQYTNQGKSNSQQRLKRLEKSLKELGSKILKENIPAKLSKIDNNALQNDRLYLYYLQNGKDMYTGDDLDIDRLSNYDIDHIIPQAFLKDNSIDNKVLVSSASNRGKSDDFPSLEVVKKRKTFWYQLLKSKLISQRKFDNLTKAERGGLLPEDKAGFIQRQLVETRQITKHVARLLDEKFNNKKDENNRAVRTVKIITLKSTLVSQFRKDFELYKVREINDFHHAHDAYLNAVIASALLKKYPKLEPEFVYGDYPKYNSFRERKSATEKVYFYSNIMNIFKKSISLADGRVIERPLIEVNEETGESVWNKESDLATVRRVLSYPQVNVVKKVEEQNHGLDRGKPKGLFNANLSSKPKPNSNENLVGAKEYLDPKKYGGYAGISNSFAVLVKGTIEKGAKKKITNVLEFQGISILDRINYRKDKLNFLLEKGYKDIELIIELPKYSLFELSDGSRRMLASILSTNNKRGEIHKGNQIFLSQKFVKLLYHAKRISNTINENHRKYVENHKKEFEELFYYILEFNENYVGAKKNGKLLNSAFQSWQNHSIDELCSSFIGPTGSERKGLFELTSRGSAADFEFLGVKIPRYRDYTPSSLLKDATLIHQSVTGLYETRIDLAKLGEG

SEQ ID NO: 574 - protein, 1370 aa, Streptococcus ratti FA-1 = DSM 20564
MKKPYSIGLDIGTNSVGWAVITDDYKVPAKKMKVLGNTDKNYIKKNLLGALLFDSGNTAEDRRLKRTARRRYTRRRNRLLYLQDIFSDEMNKVDESFFHRLEDSFLVSEDKRGDHHPIFGNVVDEVKYHEQFPTIYHLRKYLADTPEKADLRLVYLALAHMIKFRGHFLIDDPKLDVKNTDSQELFSQFLTAYDVTQEDSHLADVKINISDIITEKMNKSRKVEALLFHFPSQKKNSFFGNLVSLVFGLLPNFKTNFNLAEDAKLQLSKDSYDEDLENLLGQIGDEYTDVFVAARKLYDSILLSGILTVNDLSTKAILSASMVRRYEEHNKDLAKLKAFVKANFTHDVFKEVFSDASKNGYAGYIEGKTSQEDFYKYVKNLIGKVDGSADFIEKIDREDFLRKQRTFDNGSIPHQVHLAEMKAILRRQGEYYPFLKEHAEKIQQILTFRIPYYVGPLDRHGHSDFAWASFNSEEKVTPWNFEEIIDKNKSAQAFIERMTNQDLYLPNEKVLPKHSPLYEKYTVYNELTKIKYVTETGTAKFFDANLKQEIFDGLFKKERKVTKRKLLTFLEKNFDEFRIVDIQGLDKETETFNASYGIYQDLLKIIKDKAFMDDSENADILEDIVLTLTLFEDREMIKQRLAKYADLFDKKVIDNLARRRYTGWGRLSAKLLNGIRDKRSRKTIMDYLVDDGRSNRNLMQLITDDNLTFKDEIAKAQYSDNSDDLHQVVQDLAGSPAIKKGILQSVKIVDELVKVMGYEPEQIVVEMARENQTTAKGRRNSQQRYKRLEEAIKNLDRDLNYKILKEHPTDNQALQNDRLFLYYLQNGRDMYTGESLDINRLSDYDIDHIIPQAFIKDNSIDNRVLVSSAKNRGKSDDVPSEDVVNRMRPFWNKLLNCGLISQRKYSNLTKKELTPNDKAGFIKRQLVETRQITKHVARILDEHFNKEFDEDKKRIRKVKVVTLKSNLVSNFRKEFELYKVREINDYHHAHDAYLNAVVAKALLMKYPKLEPEFVYGEYPKYNSYRERKTATQRMFFYSNIMNMFKSKVKLADERIIERPMIEVNDETGEIAWDKTKHIATVKKVLSYPQINIVKKVEEQTGGLTNETIYPRGSFDKLLNRKNTLEASKYGGFGSPTVAYCVLVVADSKNENGKVKKLKLGSELLGITILEKNDFENNSLDFLSRKGYQGVQEKKIIKLPKYSLFEFQDGSRRMLSSVMANDNKRGDLQKANEMILPAYLVKLLYHAKHINSVGEPAHKNYINEHCSEFQDLLNYIRQFADKFVDVDKNLSKIRSLSKSMAEYSVSEICSSFVNLLTLTALGAPADFKFFGTTIPRKRYGSPQSILSATLIHQSITGLYETRIDLSKLGED

SEQ ID NO: 575 - protein, 1370 aa, Streptococcus agalactiae ZQ0910
MNKPYSIGLDIGTNSVGWSIITDDYKVPAKKMRVLGNTDKEYIKKNLIGALLFDGGNTAADRRLKRTARRRYTRRRNRILYLQEIFAEEMSKVDDSFFHRLEDSFLVEEDKRGSKYPIFATLQEEKDYHEKFSTIYHLRKELADKKEKADLRLIYIALAHIIKFRGHFLIEDDSFDVRNTDISKQYQDFLEIFNTTFENNDLLSQNVDVEAILTDKISKSAKKDRILAQYPNQKSTGIFAEFLKLIVGNQADFKKYFNLEDKTPLQFAKDSYDEDLENLLGQIGDEFADLFSAAKKLYDSVLLSGILTVIDLSTKAPLSASMIQRYDEHREDLKQLKQFVKASLPEKYQEIFADSSKDGYAGYIEGKTNQEAFYKYLSKLLTKQEDSENFLEKIKNEDFLRKQRTFDNGSIPHQVHLTELKAIIRRQSEYYPFLKENQDRIEKILTFRIPYYIGPLAREKSDFAWMTRKTDDSIRPWNFEDLVDKEKSAEAFIHRMTNNDFYLPEEKVLPKHSLIYEKFTVYNELTKVRYKNEQGETYFFDSNIKQEIFDGVFKEHRKVSKKKLLDFLAKEYEEFRIVDVIGLDKENKAFNASLGTYHDLEKILDKDFLDNPDNESILEDIVQTLTLFEDREMIKKRLENYKDLFTESQLKKLYRRHYTGWGRLSAKLINGIRDKESQKTILDYLIDDGRSNRNFMQLINDDGLSFKSIISKAQAGSHSDNLKEVVGELAGSPAIKKGILQSLKIVDELVKVMGYEPEQIVVEMARENQTTNQGRRNSRQRYKLLDDGVKNLASDLNGNILKEYPTDNQALQNERLFLYYLQNGRDMYTGEALDIDNLSQYDIDHIIPQAFIKDDSIDNRVLVSSAKNRGKSDDVPSLEIVKDCKVFWKKLLDAKLMSQRKYDNLTKAERGGLTSDDKARFIQRQLVETRQITKHVARILDERFNNELDSKGRRIRKVKIVTLKSNLVSNFRKEFGFYKIREVNNYHHAHDAYLNAVVAKAILTKYPQLEPEFVYGDYPKYNSYKTRKSATEKLFFYSNIMNFFKTKVTLADGTVVVKDDIEVNNDTGEIVWDKKKHFATVRKVLSYPQNNIVKKTEIQTGGFSKESILAHGNSDKLIPRKTKDIYLDPKKYGGFDSPIVAYSVLVVADIKKGKAQKLKTVTELLGITIMERSRFEKNPSAFLESKGYLNIRADKLIILPKYSLFELENGRRRLLASAGELQKGNELALPTQFMKFLYLASRYNESKGKPEEIEKKQEFVNQHVSYFDDILQLINDFSKRVILADANLEKINKLYQDNKENISVDELANNIINLFTFTSLGAPAAFKFFDKIVDRKRYTSTKEVLNSTLIHQSITGLYETRIDLGKLGED

SEQ ID NO: 576 - protein, 1371 aa, Streptococcus dysgalactiae subsp. equisimilis AC-2713
MDKKYSIGLDIGTNSVGWAVITDDYKVPSKKFKVLGNTDRHSIKKNLIGALLFDSGETAEATRLKRTARRRYTRRKNRIRYLQEIFSSEMSKVDDSFFHRLEESFLVEEDKKHERHPIFGNIVDEVAYHEKYPTIYHLRKKLADSTDKADLRLIYLALAHMIKFRGHFLIEGDLNPDNSDMDKLFIQLVQTYNQLFEENPINASRVDAKAILSARLSKSRRLENLIAQLPGEKRNGLFGNLIALSLGLTPNFKSNFDLAEDAKLQLSKDTYDDDLDNLLAQIGDQYADLFLAAKNLSDAILLSDILRVNSEITKAPLSASMIKRYDEHHQDLTLLKALVRQQLPEKYKEIFFDQSKNGYAGYIDGGASQEEFYKFIKPILEKMDGTEELLAKLNREDLLRKQRTFDNGSIPHQIHLGELHAILRRQEDFYPFLKDNREKIEKILTFRIPYYVGPLARGNSRFAWMTRKSEETITPWNFEEVVDKGASAQSFIERMTNFDKNLPNEKVLPKHSLLYEYFTVYNELTKVKYVTEGMRKPEFLSGKQKEAIVDLLFKTNRKVTVKQLKEDYFKKIECFDSVEISGVEDRFNASLGTYHDLLKIIKDKDFLDNEENEDILEDIVLTLTLFEDKEMIEERLKKYANLFDDKVMKQLKRRHYTGWGRLSRKLINGIRDKQSGKTILDFLKSDGFANRNFMQLINDDSLTFKEAIQKAQVSGQGHSLHEQIANLAGSPAIKKGILQSVKVVDELVKVMGHKPENIVIEMARENQTTQKGQKNSRERMKRIEEGIKELGSQILKEHPVENTQLQNEKLYLYYLQNGRDMYVDQELDINRLSDYDVDHIVPQSFIKDDSIDNKVLTRSDKNRGKSDNVPSEEVVKKMKNYWRQLLNAKLITQRKFDNLTKAERGGLSELDKAGFIKRQLVETRQITKHVAQILDSRMNTKYDENDKLIREVKVITLKSKLVSDFRKDFQFYKVREINNYHHAHDAYLNAVVGTALIKKYPKLESEFVYGDYKVYDVRKMIAKSEQEIGKATAKRFFYSNIMNFFKTEITLANGEIRKRPLIETNEETGEIVWDKGRDFATVRKVLSMPQVNIVKKTEVQTGALTNESIYARGSFDKLISRKHRFESSKYGGFGSPTVTYSVLVVAKSKVQDGKVKKIKTGKELIGITLLDKLVFEKNPLKFIEDKGYGNVQIDKCIKLPKYSLFEFENGTRRMLASVMANNNSRGDLQKANEMFLPAKLVTLLYHAHKIESSKELEHEAYILDHYNDLYQLLSYIERFASLYVDVEKNISKVKELFSNIESYSISEICSSVINLLTLTASGAPADFKFLGTTIPRKRYGSPQSILSSTLIHQSITGLYETRIDLSQLGGD

SEQ ID NO: 577 - protein, 1370 aa, Streptococcus agalactiae H36B
  MOD_RES (9)..(9): Xaa = any amino acid
MNKPYSIGXDIGTNSVGWSIITDDYKVPAKKMRVLGNTDKEYIKKNLIGALLFDGGNTAADRRLKRTARRRYTRRRNRILYLQEIFAEEMSKVDDSFFHRLEDSFLVEEDKRGSKYPIFATLQEEKDYHEKFSTIYHLRKELADKKEKADLRLIYIALAHIIKFRGHFLIEDDSFDVRNTDISKQYQDFLEIFNTTFENNDLLSQNVDVEAILTDKISKSAKKDRILAQYPNQKSTGIFAEFLKLIVGNQADFKKYFNLEDKTPLQFAKDSYDEDLENLLGQIGDEFADLFSAAKKLYDSVLLSGILTVIDLSTKAPLSASMIQRYDEHREDLKQLKQFVKASLPEKYQEIFADSSKDGYAGYIEGKTNQEAFYKYLSKLLTKQEDSENFLEKIKNEDFLRKQRTFDNGSIPHQVHLTELKAIIRRQSEYYPFLKENQDRIEKILTFRIPYYIGPLAREKSDFAWMTRKTDDSIRPWNFEDLVDKEKSAEAFIHRMTNNDFYLPEEKVLPKHSLIYEKFTVYNELTKVRYKNEQGETYFFDSNIKQEIFDGVFKEHRKVSKKKLLDFLAKEYEEFRIVDVIGLDKENKAFNASLGTYHDLEKILDKDFLDNPDNESILEDIVQTLTLFEDREMIKKRLENYKDLFTESQLKKLYRRHYTGWGRLSAKLINGIRDKESQKTILDYLIDDGRSNRNFMQLINDDGLSFKSIISKAQAGSHSDNLKEVVGELAGSPAIKKGILQSLKIVDELVKVMGYEPEQIVVEMARENQTTNQGRRNSRQRYKLLDDGVKNLASDLNGNILKEYPTDNQALQNERLFLYYLQNGRDMYTGEALDIDNLSQYDIDHIIPQAFIKDDSIDNRVLVSSAKNRGKSDDVPSLEIVKDCKVFWKKLLDAKLMSQRKYDNLTKAERGGLTSDDKARFIQRQLVETRQITKHVARILDERFNNELDSKGRRIRKVKIVTLKSNLVSNFRKEFGFYKIREVNNYHHAHDAYLNAVVAKAILTKYPQLEPEFVYGDYPKYNSYKTRKSATEKLFFYSNIMNFFKTKVTLADGTVVVKDDIEVNNDTGEIVWDKKKHFATVRKVLSYPQNNIVKKTEIQTGGFSKESILAHGNSDKLIPRKTKDIYLDPKKYGGFDSPIVAYSVLVVADIKKGKAQKLKTVTELLGITIMERSRFEKNPSAFLESKGYLNIRADKLIILPKYSLFELENGRRRLLASAGELQKGNELALPTQFMKFLYLASRYNESKGKPEEIEKKQEFVNQHVSYFDDILQLINDFSKRVILADANLEKINKLYQDNKENISVDELANNIINLFTFTSLGAPAAFKFFDKIVDRKRYTSTKEVLNSTLIHQSITGLYETRIDLGKLGED

SEQ ID NO: 578 - protein, 1345 aa, Streptococcus mutans A19
MKKPYSIGLDIGTNSVGWSVVTDDYKVPAKKMKVLGNTDKSHIEKNLLGALLFDSGNTAEDRRLKRTARRRYTRRRNRILYLQEIFSEEMGKVDDSFFHRLEDSFLVTEDKRGERHPIFGNLEEEVKYHENFPTIYHLRQYLADNPEKVDLRLVYLALAHIIKFRGHFLIEGKFDTRNNDVQRLFQEFLAVYDNTFENSSLQEQNVQVEEILTDKISKSAKKDRVLKLFPNEKSNGRFAEFLKLIVGNQADFKKHFELEEKAPLQFSKDTYEEELEVLLAQIGDNYAELFLSAKKLYDSILLSGILTVTDVGTKAPLSASMIQRYNEHQMDLAQLKQFIRQKLSDKYNEVFSDVSKDGYAGYIDGKTNQEAFYKYLKGLLNKIEGSGYFLDKIEREDFLRKQRTFDNGSIPHQIHLQEMRAIIRRQAEFYPFLADNQDRIEKLLTFRIPYYVGPLARGKSDFAWLSRKSADKITPWNFDEIVDKESSAEAFINRMTNYDLYLPNQKVLPKHSLLYEKFTVYNELTKVKYKTEQGKTAFFDANMKQEIFDGVFKVYRKVTKDKLMDFLEKEFDEFRIVDLTGLDKENKVFNASYGTYHDLCKILDKDFLDNSKNEKILEDIVLTLTLFEDREMIRKRLENYSDLLTKEQVKKLERRHYTGWGRLSAELIHGIRNKESRKTILDYLIDDGNSNRNFMQLINDDALSFKEEIAKAQVIGETDNLNQVVSDIAGSPAIKKGILQSLKIVDELVKIMGHQPENIVVEMARENQFTNQGRRNSQQRLKGLTDSIKEFGSQILKEHPVENSQLQNDRLFLYYLQNGRDMYTGEELDIDYLSQYDIDHIIPQAFIKDNSIDNRVLTSSKENRGKSDDVPSKDVVRKMKSYWSKLLSAKLITQRKFDNLTKAERGGLTDDDKAGFIKRQLVETRQITKHVARILDERFNTETDENNKKIRQVKIVTLKSNLVSNFRKEFELYKVREINDYHHAHDAYLNAVIGKALLGVYPQLEPEFVYGDYPHFHGHKENKATAKKFFYSNIMNFFKKDDVRIDKNGEIIWKKDEHISNIKKVLSYPQVNIVKKVEEQTGGFSKESILPKGNSDKLIPRKTKKFYWDTKKYGGFDSPIVAYSILVIADIEKGKSKKLKTVKALVGVTIMEKMTFERDPVAFLERKGYRNVQEENIIKLPKYSLFKLENGRKRLLASARELQKGNEIVLPNHLGTLLYHAKNIHKVDEPKHLDYVDKHKDEFKELLDVVSNFSKKYTLAEGNLEKIKELYAQNNGEDLKELASSFINLLTFTAIGAPATFKFFDKNIDRKRYTSTTEILNATLIHQSITGLYETRIDLSKLGGD

SEQ ID NO: 579 - protein, 1370 aa, Streptococcus agalactiae CJB111
  MOD_RES (117)..(117): Xaa = any amino acid
MNKPYSIGLDIGTNSVGWSIITDDYKVPAKKMRVLGNTDKEYIKKNLIGALLFDGGNTAADRRLKRTARRRYTRRRNRILYLQEIFAEEMSKVDDSFFHRLEDSFLVEEDKRGSKYXIFATLQEEKDYHEKFSTIYHLRKELADKKEKADLRLIYIALAHIIKFRGHFLIEDDSFDVRNTDISKQYQDFLEIFNTTFENNDLLSQNVDVEAILTDKISKSAKKDRILAQYPNQKSTGIFAEFLKLIVGNQADFKKYFNLEDKTPLQFAKDSYDEDLENLLGQIGDEFADLFSAAKKLYDSVLLSGILTVIDLSTKAPLSASMIQRYDEHREDLKQLKQFVKASLPEKYQEIFADSSKDGYAGYIEGKTNQEAFYKYLSKLLTKQEDSENFLEKIKNEDFLRKQRTFDNGSIPHQVHLTELKAIIRRQSEYYPFLKENQDRIEKILTFRIPYYIGPLAREKSDFAWMTRKTDDSIRPWNFEDLVDKEKSAEAFIHRMTNNDFYLPEEKVLPKHSLIYEKFTVYNELTKVRYKNEQGETYFFDSNIKQEIFDGVFKEHRKVSKKKLLDFLAKEYEEFRIVDVIGLDKENKAFNASLGTYHDLEKILDKDFLDNPDNESILEDIVQTLTLFEDREMIKKRLENYKDLFTESQLKKLYRRHYTGWGRLSAKLINGIRDKESQKTILDYLIDDGRSNRNFMQLINDDGLSFKSIISKAQAGSHSDNLKEVVGELAGSPAIKKGILQSLKIVDELVKVMGYEPEQIVVEMARENQTTNQGRRNSRQRYKLLDDGVKNLASDLNGNILKEYPTDNQALQNERLFLYYLQNGRDMYTGEALDIDNLSQYDIDHIIPQAFIKDDSIDNRVLVSSAKNRGKSDDVPSLEIVKDCKVFWKKLLDAKLMSQRKYDNLTKAERGGLTSDDKARFIQRQLVETRQITKHVARILDERFNNELDSKGRRIRKVKIVTLKSNLVSNFRKEFGFYKIREVNNYHHAHDAYLNAVVAKAILTKYPQLEPEFVYGDYPKYNSYKTRKSATEKLFFYSNIMNFFKTKVTLADGTVVVKDDIEVNNDTGEIVWDKKKHFATVRKVLSYPQNNIVKKTEIQTGGFSKESILAHGNSDKLIPRKTKDIYLDPKKYGGFDSPIVAYSVLVVADIKKGKAQKLKTVTELLGITIMERSRFEKNPSAFLESKGYLNIRADKLIILPKYSLFELENGRRRLLASAGELQKGNELALPTQFMKFLYLASRYNESKGKPEEIEKKQEFVNQHVSYFDDILQLINDFSKRVILADANLEKINKLYQDNKENISVDELANNIINLFTFTSLGAPAAFKFFDKIVDRKRYTSTKEVLNSTLIHQSITGLYETRIDLGKLGED

SEQ ID NO: 580 - protein, 1370 aa, Streptococcus agalactiae LADL-90-503
MNKPYSIGLDIGTNSVGWSIITDDYKVPAKKMRVLGNTDKEYIKKNLIGALLFDGGNTAADRRLKRTARRRYTRRRNRILYLQEIFAEEMSKVDDSFFHRLEDSFLVEEDKRGSKYPIFATMQEEKDYHEKFPTIYHLRKELADKKEKADLRLVYLALAHIIKFRGHFLIEDDRFDVRNTDIQKQYQAFLEIFDTSFENNHLLSQNVDVEAILTDKISKSAKKDRILAQYPNQKSTGIFAEFLKLIVGNQADFKKHFNLEDKTPLQFAKDSYDEDLENLLGQIGDEFADLFSAAKKLYDSVLLSGILTVTDLSTKAPLSAYMIQRYDEHREDLKQLKQFVKASLPEKYQEIFADSSKDGYAGYIEGKTNQEAFYKYLSKLLTKQEDSEYFLEKIKNEDFLRKQRTFDNGSIPHQVHLTELKAIIRRQSEYYPFLKENQDKIEKILTFRIPYYVGPLARGNSDFAWMTRKTDDSIRPWNFEDLVDKEKSAEAFIHRMTNNDLYLPEEKVLPKHSLIYEKFTVYNELTKVRYKNEQGETYFFDSNVKQEIFDGVFKEHRKVSKKQLLDFLAKEFEEFRIVDVTGLDKENKAFNASLGTYHDLKKILDKDFLDNPDNESILEDIVQTITLFEDREMIKKRLENYKDLFTESQLKKLYRRHYTGWGRLSAKLINGIRDRESQKTILDYLISDGRANRNFMQLINDDGLSFKSIISKAQSGSHSDNLKEVVGELAGSPAIKKGILQSLKIVDELVKVMGYEPEQIVVEMARENQTTNQGRRNSRQRYKLLEDGVKNLASDLNGDILKEYPTDNQALQNERLFLYYLQNGRDMYTGEALDIDNLSQYDIDHIVPQAFIKDDSIDNRVLVSSAKNRGKSDDVPSIDIVKARKAFWKKLLDAKLISQRKYDNLTKAERGGLTPDDKAGFIQRQLVETRQITKHVARILDERFNNKVDDNNKPIRKVKIVTLKSNLVSNFRKEFGFYKIREVNNYHHAHDAYLNAVVAKAILTKYPQLEPEFVYGDYPKYNSYKTRKSATEKLFFYSNIMNFFKTKVTLADETVVVKDDIEVNNETGEIAWDKKKHFATVRKVLSYPQVNIVKKTEVQTGGFSKESILAHSNSDKLIPRKTKDIYLDPKKYGGFDSPIVAYSVLVLADIKKGKAQKLKTVKELIGITIMERERFEKNPSAFLESKGYLNIRTDKLIILPKYSLFELENGRRRLLASAGELQKGNELALPTQYMKFLYLASRYNESKGKPEEIEKKQEFVNQHISYFDDILQLINDFSKRVILADANLEKINKLYSDNKDNTPVDELAKNIINLFTFTSLGAPAAFKFFDKSVDRKRYTSTKEVLDSTLIHQSITGLYETRIDLGKLGED

SEQ ID NO: 581 - protein, 1345 aa, Streptococcus mutans ATCC 25175
MKKPYSIGLDIGTNSVGWAVVTDDYKVPAKKMKVLGNTDKSHIKKNLLGALLFDSGNTAADRRLKRTARRRYTRRRNRILYLQEIFAEEMSKVDDSFFHRLEDSFLVTEDKRGERHPIFGNLEEEVKYHENFPTIYHLRQYLADNPEKVDLRLVYLALAHIIKFRGHFLIEGKFDTRNNDVQRLFQEFLAVYDNTFENSSLQEQNVQVEEILTDKISKSAKKDRVLKLFPNEKSNGRFAEFLKLIVGNQADFKKHFELEEKAPLQFSKDTYEEELEVLLAQIGDNYAELFLSAKKLYDSILLSGILTVTDVSTKAPLSASMIQRYNEHQMDLAQLKQFIRQKLSDKYNEVFSDVSKDGYAGYIDGKTNQEAFYKYLKGLLNKIEGSGYFLDKIEREDFLRKQRTFDNGSIPHQIHLQEMRAIIRRQAEFYPFLADNQDRIEKILTFRIPYYVGPLARGKSDFAWLSRKSADKITPWNFDEIVDKESSAEAFINRMTNYDLYLPNQKVLPKHSLLYEKFTVYNELTKVKYKTEQGKTAFFDANMKQEIFDGVFKVYRKVTKDKLMDFLEKEFDEFRIVDLTGLDKENKVFNASYGTYHDLCKILDKDFLDNSKNEKILEDIVLTLTLFEDREMIRKRLENYSDLLTKEQVKKLERRHYTGWGRLSAELIHGIRNKESRKTILDYLIDDGNSNRNFMQLINDDALSFKEEIAKAQVIGETDNLNQVVSDIAGSPAIKKGILQSLKIVDELVKIMGHQPENIVVEMARENQFTKQGRRNSQQRLKGLTDSIKEFGSQILKEHPVENSQLQNDRLFLYYLQNGRDMYTGEELDIDYLSQYDIDHIIPQAFIKDNSIDNRVLTSSKENRGKSDDVPSKDVVRKMKSYWSKLLSAKLITQRKFDNLTKAERGGLTDDDKAGFIKRQLVETRQITKHVARILDERFYTETDENNKKIRQVKIVTLKSNLVSNFRKEFELYKVREINDYHHAHDAYLNAVIGKALLGVYPQLEPEFVYGDYPHFHGHKENKATAKKFFYSNIMNFFKKDDVRTDKNGEIIWKKDEHISNIKKVLSYPQVNIVKKVEEQTGGFSKESILPKGNSDKLIPRKTKKFYWDTKKYGGFDSPIVAYSILVIADIEKGKSKKLKTVKALVGVTIMEKMTFERDPVAFLERKGYRNVQEENIIKLPKYSLFKLENGRKRLLASARELQKGNEIVLPNHLGTLLYHAKNIHKVDEPKHLDYVDKHKDEFKELLDVVSNFSKKYTLAEGNLEKIKELYAQNNGEDLKELASSFINLLTFTAIGAPATFKFFDKNIDRKRYTSTTEILNATLIHQSITGLYETRIDLSKLGGD

SEQ ID NO: 582 - protein, 1350 aa, Streptococcus mutans KK23
MKKPYSIGLDIGTNSVGWAVVTDDYKVPAKKMKVLGNTDKSHIEKNLLGALLFDSGNTAEDRRLKRTARRRYTRRRNRILYLQEIFSEEMGKVDDSFFHRLEDSFLVTEDKRGERHPIFGNLEEEVKYHENFPTIYHLRQYLADNPEKVDLRLVYLALAHIIKFRGHFLIEGKFDTRNNDVQRLFQEFLAVYDNTFENSSLQEQNVQVEEILTDKISKSAKKDRVLKLFPNEKSNGRFAEFLKLIVGNQADFKKHFELEEKAPLQFSKDTYEEELEVLLAQIGDNYAELFLSAKKLYDSILLSGILTVTDVSTKAPLSASMIQRYNEHQMDLTQLKQFIRQKLSDKYNEVFSDVSKDGYAGYIDGKTNQEAFYKYLKGLLNKIEGSGYFLDKIEREDFLRKQRTFDNGSIPHQIHLQEMRAIIRRQAEFYPFLADNQDRIEKILTFRIPYYVGPLARGKSDFAWLSRKSADKITPWNFDEIVDKESSAEAFINRMTNYDLYLPNQKVLPKHSLLYEKFTVYNELTKVKYKTEQGKTAFFDANMKQEIFDGVFKVYRKVTKDKLMDFLEKEFDEFRIVDLTGLDKENKAFNASYGTYHDLRKILDKDFLDNSKNEKILEDIVLTLTLFEDREMIRKRLKNYSDLLTKEQLKKLERRHYTGWGRLSAELIHGIRNKESRKTILDYLIDDGNSNRNFMQLINDDALSFKEEIAKAQVIGETDNLNQVVSDIAGSPAIKKGILQSLKIVDELVKIMGHQPENIVVEMARENQFTNQGRQNSQQRLKGLTDSIKEFGSQILKEHPVENSQLQNDRLFLYYLQNGRDMYTGEELDIDYLSQYDIDHIIPQAFIKDNSIDNRVLTSSKENRGKSDDVPSEDVVNRMRPFWNKLLSSGLISQRKYNNLTKKELTLDDKAGFIKRQLVETRQITKHVARMLDERFNKEFDDNNKRICKVKIVTLKSNLVSSFRKEFELYKVREINDYHHAHDAYLNAVVVKALLVKYSKLEPEFVYGEYPKYNSYRERKTATQKMFFYSNIMNMFKSKVKLADDQIVERPMIEVNDETGEIAWDKTKHITTVKKVLSYPQVNIVKKVEEQTIGQNGGLFDDNPKSPLEVIPSKLVPLKKALNPEKYGGYQKPTTAYPILLIVDTKQLIPISVMDKKRFEQNPVKFLKDKGYQQIEKNNFVKLPKYTLVDIGNGIKRLWASSKEVHKGNQLVVSKKSQDLLYHAHHLDNDYSNEYVKNHYQQFDILFNEITSFSKKCKLGKEHIQKIEEAYSKERDSASIEELADGFIKLLGFTQLGATSPFSFLGIKLNQKQYTGKKDYLLPCMEATLIHQSITGLYETRIDLSKLGGD

SEQ ID NO: 583 - protein, 1345 aa, Streptococcus mutans S1B
MKKPYSIGLDIGTNSVGWAVVTDDYKVPAKKMKVLGNTDKSHIKKNLLGALLFDSGNTAEDRRLKRTARRRYTRRRNRILYLQEIFSEEMGKVDDSFFHRLDESFLTDDDKNFDSYPIFGNKAEEDAYHQKFPTIYHLRKHLADSTEKADLRLVYLALAHMIKFRGHFLIEGELNAENTDVQKLFADFVGVYDRTFDDSHLSEITVDASSILTEKISKSRRLEKLINNYPKEKKNTLFRNLVALSLGLQPNFKTNFKLSEDAKLQFSKDTYEEDLEELLGKIGDDYADLFTLAKNLYDAILLSGILTADDSSTKAPLSASMIKRYAEHHEDLEKLKEFIKANKPELYHDIFKDETKNGYAGYIENGVKQDEFYKYLKNTLSKIAGSDYFLDKIEREDFLRKQRTFDNGSIPHQIHLQEMHAILRRQGDYYPFLKENQDRIEKILTFRIPYYVGPLARGKSDFAWLSRKSADKITPWNFDEIVDKESSVEAFINRMTNYDLYLPNQKVLPKHSLLYEKFTVYNELTKVKYKTEQGKTAFFDANMKQEIFDGVFKVYRKVTKDKLMDFLEKEFDEFRIVDLTGLDKENKAFNASYGTYHDLRKILDKDFLDNSKNEKILEDIVLTLTLFEDREMIRKRLKNYSDLLTKEQLKKLERRHYTGWGRLSAELIHGIRNKESRKTILDYLIDDGNSNRNFMQLINDDALSFKEEIAKAQVIGETDNLNQVVSDIAGSPAIKKGILQSLKIVDELVKIMGHQPENIVVEMARENQFTNQGRRNSQQRLKGLTDSIKEFGSQILKEHPVENSQLQNDRLFLYYLQNGRDMYTGEELDIDYLSQYDIDHIIPQAFIKDNSIDNRVLTSSKENRGKSDDVPSKDVVRKMKSYWSKLLSAKLITQRKFDNLTKGERGGLTDDDKAGFIKRQLVETRQITKHVARILDERFNTETDENNKKIRQVKIVTLKSNLVSNFRKEFELYKVREINDYHHAHDAYLNAVIGKALLGVYPQLEPEFVYGDYPHFHGHKENKATAKKFFYSNIMNFFKKDDVRTDKNGEIIWKKDEYISNIKKVLSYPQVNIVKKVEEQTGGFSKESILPKGDSDKLIPRKTKKFYWDTKKYGGFDSPIVAYSILVIADIEKGKSKKLKTVKALVGVTIMEKMTFERDPVAFLERKGYRNVQEENIIKLPKYSLFKLENGRKRLLASARELQKGNEIVLPNHLGTLLYHAKNIHKVDEPKHLDYVDKHKDEFKELLDVVSNFSKKYTLAEGNLEKIKELYAQNNGEDLKELASSFINLLTFTAIGAPATFKFFDKNIDRKRYTSTTEILNATLIHQSITGLYETRIDLSKLGGD

SEQ ID NO: 584 - protein, 1371 aa, Streptococcus oralis SK610
MENKNYSIGLDIGTNSVGWSVITDDYKVPSKKMKVLGNTDKRFIKKNLIGALLFDEGTTAEARRLKRTARRRYTRRKNRLRYLQEIFAEEMSKVDSSFFHRLDDSFLIPEDKRGSKYPIFATLAEEKEYHKQFPTIYHLRKQLADSKEKTDLRLIYLALAHMIKYRGHFLYEDTFDIKNNDIQKIFSEFISIYDNTFEGSSLSGQNAQVEAIFTDKISKSAKRERVLKLFPDEKSTGLFSEFLKLIVGNQADFKKHFDLGEKAPLQFSKDTYDEDLENLLGQIGDDFADLFLVAKKLYDAILLSGILTVTDPSTKAPLSASMIERYENHQKDLAVLKQFIKNNLPEKYDEVFSDQSKDGYAGYIDGKTTQEAFYKYIKNLLSKFEGTDYFLEKIEREDFLRKQRTFDNGSIPHQIHLQEMNAILRRQGEHYPFLKDNKEKIEKILTFRIPYYVGPLARGNRDFAWLTRNSDEAIRPWNFEEIVDKASSAEDFINKMTNYDLYLPEEKVLPKHSLLYETFAVYNELTKVKFIAEGLRDYQFLDSGQKKQIVTQLFKEKRKVTEKDIIQFLHNVDGYDGIELKGIEKQFNASLSTYHDLLKIIKDKEFMDDSKNEEILENIVHTLTIFEDREMIKQRLAQYDSLFDEKVIKALIRRHYTGWGKLSAKLIDGICDKQTGNTILDYLIDDGKNNRNFMQLINDDGLSFKEITQKAQVVGKTDDVKQVVQELPGSPAIKKGILQSIKIVDELVKVMGHTPESIVIEMARENQTTARGKKNSQQRYKRIEDALKNLASGLDSNILKEHPTNNIQLQNDRLFLYYLQNGRDMYTGKPLDINQLSSYDIDHIVPQAFIKDDSLDNRVLTSLKDNRGKSDNVPSIEVVQKRKAFWQQLLDSKLISERKFNNLTKAERGGLDERDKVGFIKRQLVETRQITKHVAQILDARFNKEVNEKDKKNRTVKIITLKSNLVSNFRKEFRLYKVREINDYHHAHDAYLNAVVAKAILKKYPKLEPEFVYGDYQKYDLKRYISRSRNPKEVEKATEKYFFYSNLLNFFKEEVHYADGTIVKRENIEYSKDTGEIAWNKEKDFATIKKVLSYPQVNIVKKREVQTGGFSKESILPKGNSDKLIPRKTKDILWETTKYGGFDSPVIAYSILLIADIEKGKAKKLKTVKTLVGITIMEKAAFEENPITFLENKGYHNVRKENILCLPKYSLFELENGRRRLLASAKELQKGNEIVLPVYLTTLLYHSKNVHKLDEPEHLEYIQKHRNEFKDLLNLVSEFSQKYVLADANLEKIQNLYADNEQADIEILANSFINLLTFTALGAPAAFKFFGKDIDRKRYTTVSEILNATLIHQSITGLYETRIDLSKLGED

SEQ ID NO: 585 - protein, 1377 aa, Streptococcus agalactiae 515
MNKPYSIGLDIGTNSVGWSIITDDYKVPAKKMRVLGNTDKEYIKKNLIGALLFDGGNTAADRRLKRTARRRYTRRRNRILYLQEIFAEEMSKVDDSFFHRLEDSFLVEEDKRGSKYPIFATMQEEKYYHEKFPTIYHLRKELADKKEKADLRLVYLALAHIIKFRGHFLIEDDRFDVRNTDIQKQYQAFLEIFDTTFENNHLLSQNVDVEAILTDKISKSAKKDRILAQYPNQKSTGIFAEFLKLIVGNQADFKKHFNLEDKTPLQFAKDSYDEDLENLLGQIGDEFADLFSVAKKLYDSVLLSGILTVTDLSTKAPLSASMIQRYDEHHEDLKHLKQFVKASLPENYREVFADSSKDGYAGYIEGKTNQEAFYKYLLKLLTKQEGSEYFLEKIKNEDFLRKQRTFDNGSIPHQVHLTELRAIIRRQSEYYPFLKENQDRIEKILTFRIPYYVGPLAREKSDFAWMTRKTDDSIRPWNFEDLVDKEKSAEAFIHRMTNNDLYLPEEKVLPKHSLIYEKFTVYNELTKVRFLAEGFKDFQFLNRKQKETIFNSLFKEKRKVTEKDIISFLNKVDGYEGIAIKGIEKQFNASLSTYHDLKKILGKDFLDNTDNELILEDIVQTLTLFEDREMIKKCLDIYKDFFTESQLKKLYRRHYTGWGRLSAKLINGIRNKENQKTILDYLIDDGSANRNFMQLINDDDLSFKPIIDKARTGSHSDNLKEVVGELAGSPAIKKGILQSLKIVDELVKVMGYEPEQIVVEMARENQTTAKGLSRSRQRLTTLRESLANLKSNILEEKKPKYVKDQVENHHLSDDRLFLYYLQNGRDMYTKKALDIDNLSQYDIDHIIPQAFIKDDSIDNRVLVSSAKNRGKSDDVPSIEIVKARKMFWKNLLDAKLMSQRKYDNLTKAERGGLTSDDKARFIQRQLVETRQITKHVARILDERFNNEVDNGKKICKVKIVTLKSNLVSNFRKEFGFYKIREVNDYHHAHDAYLNAVVAKAILTKYPQLEPEFVYGMYRQKKLSKIVHEDKEEKYSEATRKMFFYSNLMNMFKRVVRLADGSIVVRPVIETGRYMGKTAWDKKKHFATVRKVLSYPQNNIVKKTEIQTGGFSKESILAHGNSDKLIPRKTKDIYLDPKKYGGFDSPIVAYSVLVVADIKKGKAQKLKTVTELLGITIMERSRFEKNPSAFLESKGYLNIRDDKLMILPKYSLFELENGRRRLLASAGELQKGNELALPTQFMKFLYLASRYNESKGKPEEIEKKQEFVNQHVSYFDDILQLINDFSKRVILADANLEKINKLYQDNKENIPVDELANNIINLFTFTSLGAPAAFKFFDKIVDRKRYTSTKEVLNSTLIHQSITGLYETRIDLGKLGED

SEQ ID NO: 586 - protein, 1375 aa, Streptococcus sp. M334
MSNKSYSIGLDIGTNSVGWAVITDDYKVPSKKMKVLGNTDKHFIKKNLIGALLFDEGTTAEDRRLKRTARRRYTRRKNRLRYLQEIFSQEISKVDSSFFHRLDDFFLVPEDKRGSKYPIFATLVEEKEYHKKFPTIYHLRKHLADSKEKTDLRLIYLALAHMIKYRGHFLYEESFDIKNNDIQKIFSEFISIYDNTFEGKSLSGQNAQVEAIFTDKISKSTKRERVLKLFPDEKSTGLFSEFLKLIVGNQADFKKHFDLEEKAPLQFSKDTYDEDLENLLGQIGDDFADLFLVAKKLYDAILLSGILTVKDLSTKAPLSASMIERYENHQKDLAALKQFIQNNLQEKYDEVFSDQSKDGYAGYIDGKTTQEAFYKYIKNLLSKFEGADYFLDKIEREDFLKKQRTFDNGSIPHQIHLQEMNAIIRRQGEHYPFLQENKEKIEKILTFRIPYYVGPLARGNGDFAWLTRNSDQAIRPWNFEEIVDQASSAEDFINKMTNYDLYLPEEKVLPKHSLLYETFAVYNELTKVKFIAEGLTRYQFLDKKQKKDIFDTFFKAENKRKVTEKDIIHYLHNVDGYDGIELKGIEKQFNASLSTYHDLLKIIKDKAFMDDSKNEEILENIIHTLTIFEDREMIKQRLAQYDSLFDEKVIKALTRRHYTGWGKLSAKLINGIRDKKSGKTILDYLIDDGEINRNFMQLIHDDGLSFKEIIQKAQVFGKTNDVKQVVQELPGSPAIKKGILQSIKIVDELVKVMGHAPESIVIEMARENQTTARGKKNSQQRYKRIEDSLKNLASGLDSNILKENPTDNIQLQNDRLFLYYLQNGRDMYTGKPLEINQLSNYDIDHIIPQAFIKDDSLDNRVLTSSKDNRGKSDNVPSLEVVEKMKAFWQQLLDSKLISERKFNNLTKAERERGGLNELDKVGFIKRQLVETRQITKHVAQFLDARFNKEVTEKDKKNRNVKIITLKSNLVSNFRKEFGLYKVREINDYHHAHDAYLNAVLAKAILKKYPKLEPEFVYGDYQKYDLQRYISKSREPKEVEKATQKYFFYSNLLNFFKEEVHYADGTIVKRENIEYSKDTGEIAWNKEKDFATVKKVLSLPQVNIVKKTEVQTGGFSKESILPKGNSDKLIPRKTKEILWDTTKYGGFDSPVIAYSILLIADIEKGKAKKLKTVKTLVGITIMEKATFEKNPITFLENKGYHNVRKENILCLPKYSLFELESGRRRMLASAKELQKGNEIVLPVYLTTLLYHSKNVHKLDEPEHLEYIQKHRYEFKDLLNLVSEFSQKYVLADANLEKIKNLYADNEQADIEILANSFINLLTFTALGAPAAFKFLGKDVDRKRYTTVSEILNATLIHQSITGLYETRIDLSKLGED

SEQ ID NO: 587 - protein, 1396 aa, Streptococcus anginosus SK52 = DSM 20563
MTKPYSIGLDIGTNSVGWAVITDDYKVPAKKMKVLGNTNRDYIKKNLLGALLFDGGETAEGRRLKRTARRRYTRRKNRLRYLQEIFAEEMMQVDESFFQRLDDSFLVEEDKQGSKYPIFGTLKEEKEYHKKFKTIYHLREELANSKEKADLRLVYLALAHMIKFRGHFLYEGDLKAENTDVQALFKDFVEEYDKTIEESHLSEITVDALSILTEKVSKSSRLENLIAHYPTEKKNTLFGNLIALSLGLQANFKTNFQLSEDAKLQFSKDTYEEDLEGLLGEVGDEYADLFVSAKNLYDAILLSGILTVDDNSTKAPLSASMVKRYKEHKEELAAFKRFIKEKLPKKYEEIFKDDTKNGYAGYVGADKKLRKRSGKLATEEEFYKYVKGILNKVEGADYFLDKIDREDFLRKQRTFDNGSIPHQIHLQEMHAILRRQGEHYPFLKENQDKIEKILTFRIPYYVGPLARKGSRFAWAEYKADEKITPWNFDDILDKEKSAEKFITRMTLNDLYLPEEKVLPKHSPLYETFTVYNELTKVKYVNEQGEAKFFDTNMKQEIFDHVFKENRKVTKDKLLNYLNKEFEEFRIVNLTGLDKENKAFNASLGTYHDLRKILDKSFLDDKVNEKIIEDIIQTLTLFEDREMIRQRLQKYSDIFTTQQLKELERRHYTGWGRLSYKLINGIRNKENKKTILDYLIDDGYANRNFMQLINDDALSFKEEIARAQIIGDVDDIANVVHDLPGSPAIKKGILQSVKIVDELVKVMGHNPTNIIIEMARENQTTDKGRRNSQQRLKLLQDSLKNLDNPVNIKNVENQQLQNDRLFLYYIQNGKDMYTGETLDINNLSQYDIDHIIPQAFIKDNSLDNRVLTRSDKNRGKSDDVPSIEVVHEMKSFWSKLLSVKLITQRKFDNLTKAERGGLTENDKAGFIKRQLVETRQITKHVAQVLDARFNAKHDENKKVIRDVKIITLKSNLVSQFRKDFKFYKVREINDYHHAHDAYLNAVIGTALLKKYPKLASEFVYGEFKKYDVRKFIAKSDKEIGKATAKYFFYSNLMNFFKKEVKFADGTVVERPDIETSEDGEIAWNKQTDFKIVRKVLSYPQVNIVKKTEVQTHGLDRGKPRGLFNANPSPKPKPDSSENLVGIKRNLDPKKYGGYAGISNSYAVLVKAIIEKGVKKKETMVLEFQGISILDRITFEKDKRAFLLGKGYKDIKKIIELPKYSLFELKDGSRRMLASILSTNNKRGEIHKGNELFVPQKFTTLLYHAKRINNPINKDHIEYVKKHRDDFKELLNYVLEFNEKYVGATKNGERLKEAVADFDSKSNEEICTSFLGAVNSKNAGLFELTSLGSASDFEFLGVKIPRYRDYTPSSLLKDSILIHQSITGLYETRIDLSKLGED

SEQ ID NO: 588 - protein, 1367 aa, Streptococcus pyogenes MGAS1882
MDKKYSIGLDIGTNSVGWAVITDDYKVPSKKFKVLGNTDRHSIKKNLIGALLFGSGETAEATRLKRTARRRYTRRKNRICYLQEIFSNEMAKVDDSFFHRLEESFLVEEDKKHERHPIFGNIVDEVAYHEKYPTIYHLRKKLADSTDKADLRLIYLALAHMIKFRGHFLIEGDLNPDNSDVDKLFIQLVQIYNQLFEENPINASRVDAKAILSARLSKSRRLENLIAQLPGEKRNGLFGNLIALSLGLTPNFKSNFDLAEDAKLQLSKDTYDDDLDNLLAQIGDQYADLFLAAKNLSDAILLSDILRVNSEITKAPLSASMIKRYDEHHQDLTLLKALVRQQLPEKYKEIFFDQSKNGYAGYIDGGASQEEFYKFIKPILEKMDGTEELLVKLNREDLLRKQRTFDNGSIPHQIHLGELHAILRRQEDFYPFLKDNREKIEKILTFRIPYYVGPLARGNSRFAWMTRKSEETITPWNFEEVVDKGASAQSFIERMTNFDKNLPNEKVLPKHSLLYEYFTVYNELTKVKYVTEGMRKPAFLSGEQKKAIVDLLFKTNRKVTVKQLKEDYFKKIECFDSVEISGVEDRFNASLGAYHDLLKIIKDKDFLDNEENEDILEDIVLTLTLFEDRGMIEERLKTYAHLFDDKVMKQLKRRRYTGWGRLSRKLINGIRDKQSGKTILDFLKSDGFANRNFMQLIHDDSLTFKEDIQKAQVSGQGHSLHEQIANLAGSPAIKKGILQTVKIVDELVKVMGHKPENIVIEMARENQTTQKGQKNSRERMKRIEEGIKELGSQILKEHPVENTQLQNEKLYLYYLQNGRDMYVDQELDINRLSDYDVDHIVPQSFIKDDSIDNKVLTRSDKNRGKSDNVPSEEVVKKMKNYWRQLLNAKLITQRKFDNLTKAERGGLSELDKAGFIKRQLVETRQITKHVAQILDSRMNTKYDENDKLIREVKVITLKSKLVSDFRKDFQFYKVREINNYHHAHDAYLNAVVGTALIKKYPKLESEFVYGDYKVYDVRKMIAKSEQEIGKATAKYFFYSNIMNFFKTEITLANGEIRKRPLIETNGETGEIVWDKGRDFATVRKVLSMPQVNIVKKTEVQTGGFSKESILPKRNSDKLIARKKDWDPKKYGGFDSPTVAYSVLVVAKVEKGKSKKLKSVKELLGITIMERSSFEKNPIDFLEAKGYKEVKKDLIIKLPKYSLFELENGRKRMLASAGELQKGNELALPSKYVNFLYLASHYEKLKGSPEDNEQKQLFVEQHKHYLDEIIEQISEFSKRVILADANLDKVLSAYNKHRDKPIREQAENIIHLFTLTNLGAPAAFKYFDTTIDRKRYTSTKEVLDATLIHQSITGLYETRIDLSQLGGD

SEQ ID NO: 589 - protein, 1345 aa, Streptococcus mutans 8ID3
MKKPYSIGLDIGTNSVGWAVVTDDYKVPAKKMKVLGNTDKSHIEKNLLGALLFDSGNTAEDRRLKRTARRRYTRRRNRILYLQEIFSEEMGKVDDSFFHRLEDSFLVTEDKRGERHPIFGNLEEEVKYHENFPTIYHLRQYLADNPEKVDLRLVYLALAHIIKFRGHFLIEGKFDTRNNDVQRLFQEFLAVYDNTFENSSLQEQNVQVEEILTDKISKSAKKDRVLKLFPNEKSNGRFAEFLKLIVGNQADFKKHFELEEKAPLQFSKDTYEEELEVLLAQIGDNYAELFLSAKKLYDSILLSGILTVTDVGTKAPLSASMIQRYNEHQMDLAQLKQFIRQKLSDKYNEVFSDVSKDGYAGYIDGKTNQEAFYKYLKGLLNKIEGSGYFLDKIEREDFLRKQRTFDNGSIPHQIHLQEMRAIIRRQAEFYPFLADNQDRIEKLLTFRIPYYVGPLARGKSDFAWLSRKSADKITPWNFDEIVDKESSAEAFINRMTNYDLYLPNQKVLPKHSLLYEKFTVYNELIKVKYKTEQGKTAFFDANMKQEIFDGVFKVYRKVTKDKLMDFLEKEFDEFRIVDLTGLDKENKVFNASYGTYHDLCKILDKDFLDNSKNEKILEDIVLTLTLFEDREMIRKRLENYSDLLTKEQVKKLERRHYTGWGRLSAELIHGIRNKESRKTILDYLIDDGNSNRNFMQLINDDALSFKEEIAKAQVIGETDNLNQVVSDIAGSPAIKKGILQSLKIVDELVKIMGHQPENIVVEMARENQFTNQGRRNSQQRLKGLTDSIKEFGSQILKEHPVENSQLQNDRLFLYYLQNGRDMYTGEELDIDYLSQYDIDHIIPQAFIKDNSIDNRVLTSSKENRGKSDDVPSKDVVRKMKSYWSKLLSAKLITQRKFDNLTKAERGGLTDDDKAGFIKRQLVETRQITKHVARILDERFNTETDENNKKIRQVKIVTLKSNLVSNFRKEFELYKVREINDYHHAHDAYLNAVIGKALLGVYPQLEPEFVYGDYPHFHGHKENKATAKKFFYSNIMNFFKKDDVRTDKNGEIIWKKDEHISNIKKVLSYPQVNIVKKVEEQTGGFSKESILPKGNSDKLIPRKTKKFYWDTKKYGGFDSPIVAYSILVIADIEKGKSKKLKTVKALVGVTIMEKMTFERDPVAFLERKGYRNVQEENIIKLPKYSLFKLENGRKRLLASARELQKGNEIVLPNHLGTLLYHAKNIHKVDEPKHLDYVDKHKDEFKELLDVVSNFSKKYTLAEGNLEKIKELYAQNNGEDLKELASSFINLLTFTAIGAPATFKFFDKNIDRKRYTSTTEILNATLIHQSITGLYETRIDLNKLGGD

SEQ ID NO: 590 - protein, 1370 aa, Streptococcus agalactiae COH1
MNKPYSIGLDIGTNSVGYSVVTDDYKVPAKKMRVLGNTDKEYIKKNLIGALLFDGGNTASDRRLKRTARRRYTRRRNRILYLQEIFAEEMSKVDDSFFHRLEDSFLVEDDKRGSKYPIFATMQEEKDYHEKFPTIYHLRKELADKKEKANLRLVYLALAHIIKFRGHFLIEDDSFDVRNTDIQRQYQAFLEIFDTTFENNHLLSQNIDVEGILTDKISKSAKKDRILAQYPNQKSTGIFAEFLKLIVGNQADFKKHFNLEDKTPLQFAKDSYDEDLENLLGQIGDEFADLFSVAKKLYDSVLLSGILTVTDLSTKAPLSASMIQRYDEHREDLKQLKQFVKASLPEKYQEIFTDSSKDGYAGYIEGKTNQGAFYKYLSKLLTKQEGSEYFLEKIKNEDFLRKQRTFDNGSIPHQVHLTELKAIIRRQSEYYPFLKENLDRIEKILTFRIPYYVGPLAREKSDFAWMTRKTDDSIRPWNFEELVDKEASAEAFIHRMTNNDLYLPEEKVLPKHSLIYEKFTVYNELTKVRYKNEQGETYFFDSNIKQEIFDGVFKEHRKVSKKKLLDFLAKEYEEFRIVDVIGLDKENKAFNASLGTYHDLKKILDKDFLDNPDNESILEDIVQTLTLFEDREMIKKRLENYKDLFTESQLKKLYRRHYTGWGRLSAKLINGIRDKESQKTILDYLISDGRANRNFMQLIHDDGLSFKPIIDKAQAGSHSDNLKEVVGELAGSPAIKKGILQSLKIVDELVKVMGYEPEQVVVEMARENQTTNQGRRNTRQRYKLLEEGVKNLASDLNGNILKEYPTDNQALQNERLFLYYLQNGRDMYTGEALDIDNLSQYDIDHIVPQAFIKDDSIDNRVLVSSAKNRGKSDNVPSIDIVKARKAFWKKLLDAKLMSQRKYDNLTKAERGGLTSDDKARFIQRQLVETRQITKHVARILDERFNNELDSKGRRIRKVKIVTLKSNLVSNFRKEFGFYKIREVNDYHHAHDAYLNAVVAKAILTKYPQLEPEFVYGDYPKYNSYKTRKSATEKLFFYSNIMNFFKTKVTLADGTVVVKDDIEVNNDTGEIVWDKKKHFATVRKVLSYPQVNIVKKTEIQTGGFSKESILAHGNSDKLIPRKTKDIYLDPKKYGGFDSPIVAYSVLVVADIKKGKAQKLKTVTELLGITIMERFRFEKNPSAFLESKGYLNIRDDKLMILPKYSLFELENGRRRLLASAGELQKGNELALPTQYMKFLYLASRYNELKGKPEEIEQKQEFVVQHVSYFDDILQIINDFSNRVILADANLEKINKLYQDNKENISVDELANNIINLFTFTSLGAPAAFKFFDKIVDRKRYTSTKEVLNSTLIHQSITGLYETRIDLGKLGED

SEQ ID NO: 591 - protein, 1385 aa, Streptococcus salivarius K12
MTKPYSIGLDIGTNSVGWAVITDDYKVPSKKMKVLGNTSKKYIKKNLLGALLFDSGITAEGRRLKRTARRRYTRRRNRILYLQEIFSTEMATLDDAFFQRLDDSFLVPDDKRDSKYPIFGNLVEEKVYHDEFPTIYHLRKHLADSSKKADLRLVYLALAHMIKYRGHFLIEGDFNSKNNDLQKNFQDFLDTYNAIFESDLSLENSKQLEEIVKDKISKSAKKDRILKLFPGEKNSGIFSEFLKLIVGNQADFRKYFNLDEKTSLQFSKESYDEDLETLLGHIGDDYSDVFLKAKKLYDAILLSGILTVTDNGTEAPLSSAMIMRYKEHEEDLALLKAYIRNISLETYNEVFKDNTKNGYAGYIDGKTSQEDFYVYLKRLLAGLEGADYFLEKIDREDFLRKQRTFDNGSIPYQIYLQEMRAILDKQAKFYPFLAKNKERIEKILTFRIPYYVGPLARGNSDFAWSIRKRNEKITPWNFEDVIDKESSAEAFINRMTSFDLYLPEEKVLPKHSLLYENFTVYNELTKVRFIAEGMRDYQFLDSKQKKDIVRLYFKGKRKVTDKDIIEYLHAIDGYDGIELKGIEKQFNSSLSTYHDLLNIINDKEFLDDSSNETIIEEIIHTLTMFEDREMIKQRLSKFDNIFDKSVLKKLSRRHYTGWGKLSAKLINGIRDEKSGNTILDYLIDDGVSNRNFMQLIHDDALSFKKKIKKAQIIGDKDNIKQVVKSLPGSPAIKKGILQSIKIVDELVKVMGREPESIVVEMARENQYTNQGKSNSQQRLKRLEESLKGLGSKILKENVPTRLSKIDNNALQNDRLYLYYLQNGKDMYTGEELDIDRLSNYDIDHIIPQAFLKDDSIDNKVLVSSASNRGKSDDVPSLEVVKKRKTLWYQLLKSKLISQRKFDNLTKAERGGLSQEEKAGFIQRQLVETRQITKHVARLLDERFNNKKDENNRTLRTVKIITLKSSLVSQFRKDFELYKVREINDFHHAHDAYLNAVVASALLKKYPKLEPEFVYGDYPKYNSFRERKSATEKVYFYSNIMNIFKKSIPLADGTVIDRPLIEVNEETGESVWNKVADLNTVRKVLSYSQVNIVKKVEEQNHGLDRGKPKGLFNANLSSKPKPNSKENLVGAKEYLDPKKYGGYAGISNSFAILVKGTIEKGAKKKITNVLEFQGISILDRIYYRKDKLNFLLEKGYKDIELIIELPKYSLFELSDGSRRMLASILSTNNKRGEIHKGNQIFISQKFVKLLYHAKRISSTFNENHRKYVENHKKEFEELFYYILEFNENYVGAKKNGELLKSAFQSWQNHSIDELCSSFIGPTGSERKGLFELTSRGGAADFEFLGVKIPRYRDYTPSSLLKDATLIHQSVTGLYETRIDLGKLGED

SEQ ID NO: 592 - protein, 1392 aa, Streptococcus sanguinis SK330
MENKNYSIGLDIGTNSVGWAVITDDYKVPSKKMKVFGNTDKHFIKKNLIGALLFDEGATAEDRRLKRTARRRYTRRKNRLRYLQEIFSEEISKLDSSFFHRLDDSFLVPKDKRGSKYPIFATLEEEKEYHKKFPTIYHLRKHLADSKEKTDLRLIYLALAHMIKYRGHFLYEESFDIKNNDIQKIFNEFISIYDNTFEGSSLSGQNAQVEAIFTDKISKSAKRERVLKLFSDEKSTSLFSEFLKLIVGNQADFKKHFDLEEKAPLQFSKDTYDEDLENLLGQIGDGFTDLFLVAKKLYDAILLSGILTVTDPSTKAPLSASMIERYESHQKDLAALKQFIKNNLPKRYNEVFSDQSKDGYAGYIDGKTTQEAFYKYIKNLLSKFEGADYFLDKIEREDFLRKQRTFDNGSIPHQIHLQEMNAILRRQGEHYPFLKENREKIEKILTFRIPYYVGPLARGNRDFAWLTRNSDQAIRPWNFEEIVDKASSAEEFINKMTNYDLYLPEEKVLPKHSLLYETFAVYNELTKVKFIAEGLRDYQFLDSGQKKQIVNQLFKEKRKVTEKDIIHYLHNVDGYDGIELKGIEKQFNASLSTYHDLLKIIKDKEFMDDPKNEEILENIVHTLTIFEDREMIKQRLAQYDSIFDEKVIKALTRRHYTGWGKLSAKLINGICDKQTGDTILDYLIDDGKINRNFMQLINDDGLSFKEIIQKAQVVGKTDDVKQVVQELPGSPAIKKGILQSIKIVDELVKVMGYAPESIVIEMARENQTTARGKKNSQQRYKRIEDSLKNLAPGLDSNILKENPTDNIQLQNDRLFLYYLQNGKDMYTGKPLDIDQLSSYDIDHIIPQAFIKDDSIDNRVLTSSKDNRGKSDNVPSLEVVQKRKAFWQQLLDSKLISERKFNNLTKAERGGLDERDKVGFIRRQLVETRQITKHVAQILDASFNTEVNEKNQKIRTVKIITLKSNLVSNFRKEFELYKVREINDYHHAHDAYLNAVVAKAILKKYPKLEPEFVYGDYQKYDLKRYISRFKPSKEIEKATEKYFFYSNLLNFFKEEVHYADGIIVKRENIEYSKDTGEIAWNKEKDFATIKKVLSYPQVNIVKKTEIQTHGLDRGKPKGLFNSNPSPKPSEDSKENLVPIKQGLDPRKYGGYAGISNSYAVLVKAIVEKGAKKQQKTILEFQGISILDKINFENNKENYLLKKRYIEILSTITLPKYSLFEFPDGTRRRLASILSTNNKRGEIHKGNELVLPGKYTTLLYHAKNINKKLEPEHLEYVEKHRNDFAKLLECVLNFNDKYVGALKNGERIRQAFTDWETVDIEKLCFSFIGPENSKNAGLFELTSQGSASDFEFLGVKIPRYRDYAPSSLLKATLIHQSITGLYETRIDLSKLGED

SEQ ID NO: 593 - protein, 1371 aa, Streptococcus sp. oral taxon 056 str. F0418
MNNNNYSIGLDIGTNSVGWAVITDDYKVPSKKMRVLGNTDKRFIKKNLIGALLFDEGTTAEDRRLKRTARRRYTRRKNRLRYLQEIFAEEMSKVDSSFFHRLDDSFLVPEDKSGSKYPIFATLAEEKEYHKKFPTIYHLRKHLADSKEKADLRLIYLALAHITKYRGHFLYEEAFDIKNNDIQKIFNEFINIYDNTFEGSSLSGQNAQVEAIFTGKISKSVKREHVLKLFPDEKSTGLFSEFLKLIVGNQADFKKHFDLEEKASLQFSKDTYDEDLENLLGQIGDDFADLFLVAKKLYDAILLSGILTVTDPSTKAPLSASMIERYENHQEDLAALKQFIKNNLPEKYAEVFSDQSKDGYAGYIDGKTTQEAFYKYIKNLLSKFEGADYFLDKIEREDFLRKQRTFDNGSIPHQIHLQEMNAILRRQGEHYPLLKENKEKIEKILTFRIPYYVGPLARGNRDFAWLTRNSDQAIRPWNFEEIVDKASSAESFINKMTNYDLYLPEEKVLPKHSLLYETFAVYNELTKVKFIAEGLRDYQFFDSGQKKQIVNQLFKEKRKVTEKDIIHYLHNVDGYDGIELKGIEKQFNASLSTYHDLLKIIKDKEFMDNHKNQEILENIVHTLTIFEDREMIKQRLAQYDSIFDEKVIKALTRRHYTGWGKLSAKLINGICDKKTGKTILDYLIDDGYNNRNFMQLINDDGLSFKEIIQKAQVVGKTDDLTQVVRELSGSPAIKKGILQSIKIVDELVKIMGYAPESIVIEMARENQTTAKGKKNSQQRYKRIEDALKNLAPGLDSTISKENPTDNIQLQNDRLFLYYLQNGKDMYTGEALDINQLSSYDIDHIIPQAFIKDDSLDNRVLTSSKDNRGKSDNVPSLEVVKKRKAFWQQLLDSKLISERKFNNLTKAERGGLDERDKVGFIKRQLVETRQITKHVARILDARFNTEVSEKNQKIRSVKIITLKSNLVSNFRKEFKLYKVREINDYHHAHDAYLNAVVAKAILKKYPKLEPEFVYGDYQKYDLKRYISKSKDPKEVEKATEKYFFYSNLLNFFKEEVHYADGTIVKRENIEYSKDTGEIAWNKEKDFVTIKKVLSYPQVNIVKKREVQTGGFSKESILPKGNSDKLIPRKTKDILWDTTKYGGFDSPVIAYSILLIADIEKGKAKKLKTVKTLVGITIMEKAAFEKNPITFLENKGYHNVRKENILCLPKYSLFELENGRRRLLASAKELQKGNEIVLPVYLTTLLYHSKNVHKLDEPEHLEYIQKHRYEFKDLLNLVSEFSQKYVLAEANLEKIKSLYVDNEQADIEILANSFINLLTFTALGAPAAFKFFGKDVDRKRYTTVSEILNATLIHQSITGLYETRIDLSKLGED

SEQ ID NO: 594 - protein, 1370 aa, Streptococcus gallolyticus subsp. gallolyticus TX20005
MTKKNYSIGLDIGTNSVGWAVITDDYKVPAKKMKVLGNTDKKYIKKNLLGALLFDSGETAEATRLKRTARRRYTRRKNRLRYLQEIFAEEMTKVDESFFYRLDESFLTTDEKDFERHPIFGNKAEEDAYHQKFPTIYHLRNYLADSSEKADLRLVYLALAHMIKYRGHFLIEGKLNAENTDVQKLFTDFVGVYDRTFDDSHLSEITVDVASTLTEKISKSRRLENLIKYYPTEKKNTLFGNLIALALGLQPNFKMNFKLSEDAKLQFSKDTYEEDLEELLGKIGDDYADLFTSAKNLYDAILLSGILTVDDNSTKAPLSASMIKRYVEHHEDLEKLKEFIKANKSELYHDIFKDKNKNGYAGYIENGVKQDEFYKYLKNTLSKIDGSDYFLDKIEREDFLRKQRTFDNGSIPHQIHLQEMHAILRRQGDYYPFLKEKQDRIEKILTFRIPYYVGPLVRKDSRFAWAEYRSDEKITPWNFDKVIDKEKSAEKFITRMTLNDLYLPEEKVLPKHSHVYETYAVYNELTKIKYVNEQGKESFFDSNMKQEIFDHVFKENRKVTKEKLLNYLNKEFPEYRIKDLIGLDKENKSFNASLGTYHDLKKILDKAFLDDKVNEEVIEDIIKTLTLFEDKDMIHERLQKYSDIFTANQLKKLERRHYTGWGRLSYKLINGIRNKENNKTILDYLIDDGSANRNFMQLINDDTLPFKQIIQKSQVVGDVDDIEAVVHDLPGSPAIKKGILQSVKIVDELVKVMGDNPDNIVIEMARENQTTNRGRSQSQQRLKKLQSSLKELGSNILNEEKPSYIEDKVENSHLQNDQLFLYYIQNGKDMYTGDELDIDHLSDYDIDHIIPQAFIKDDSIDNRVLTSSAKNRGKSDDVPSLDIVRARKAEWVRLYKSGLISKRKFDNLTKAERGGLTEADKAGFIKRQLVETRQITKHVAQILDARFNTEHDENDKVIRDVKVITLKSNLVSQFRKDFEFYKVREINDYHHAHDAYLNAVVGTALLKKYPKLASEFVYGEYKKYDIRKFITNSSDKATAKYFFYSNLMNFFKTKVKYADGTVFERPIIETNADGEIAWNKQIDFEKVRKVLSYPQVNIVKKVETQTGGFSKESILPKGDSDKLIPRKTKKVYWDTKKYGGFDSPTVAYSVFVVADVEKGKAKKLKTVKELVGISIMERSFFEENPVEFLENKGYHNIREDKLIKLPKYSLFEFEGGRRRLLASASELQKGNEMVLPGYLVELLYHAHRADNFNSTEYLNYVSEHKKEFEKVLSCVEDFANLYVDVEKNLSKIRAVADSMDNFSIEEISNSFINLLTLTALGAPADFNFLGEKIPRKRYTSTKECLTATLIHQSITGLYETRIDLSKLGEE

SEQ ID NO: 595 - protein, 1371 aa, Streptococcus dysgalactiae subsp. equisimilis RE378
MDKKYSIGLDIGTNSVGWAVITDDYKVPSKKFKVLGNTDRHSIKKNLIGALLFDSGETAEATRLKRTARRRYTRRKNRIRYLQEIFSSEMSKVDDSFFHRLEESFLVEEDKKHERHPIFGNIVDEVAYHEKYPTIYHLRKKLADSTDKADLRLIYLALAHMIKFRGHFLIEGDLNPDNSDMDKLFIQLVQTYNQLFEENPINASRVDAKAILSARLSKSRRLENLIAQLPGEKRNGLFGNLIALSLGLTPNFKSNFDLAEDAKLQLSKDTYDDDLDNLLAQIGDQYADLFLAAKNLSDAILLSDILRVNSEITKAPLSASMIKRYDEHHQDLTLLKALVRQQLPEKYKEIFFDQSKNGYAGYIDGGASQEEFYKFIKPILEKMDGTEELLAKLNREDLLRKQRTFDNGSIPHQIHLGELHAILRRQEDFYPFLKDNREKIEKILTFRIPYYVGPLARGNSRFAWMTRKSEETITPWNFEEVVDKGASAQSFIERMTNFDKNLPNEKVLPKHSLLYEYFTVYNELTKVKYVTEGMRKPEFLSGKQKEAIVDLLFKTNRKVTVKQLKEDYFKKIECFDSVEISGVEDRFNASLGTYHDLLKIIKDKDFLDNEENEDILEDIVLTLTLFEDKEMIEERLKTYAHLFDDKVMKQLKRRHYTGWGRLSRKLINGIRDKQSGKTILDFLKSDGFANRNFIQLIHDDSLTFKEAIQKAQVSGQGHSLHEQIANLAGSPAIKKGILQSVKVVDELVKVMGHKPENIVIEMARENQTTQKGQKNSRERMKRIEEGIKELGSQILKEHPVENTQLQNEKLYLYYLQNGRDMYVDQELDINRLSDYDVDHIVPQSFIKDDSIDNKVLTRSDKNRGKSDDVPSEEVVKKMKNYWRQLLNAKLITQRKFDNLTKAERGGLSELDKAGFIKRQLVETRQITKHVAQILDSRMNTKYDENDKLIREVKVITLKSKLVSDFRKDFQFYKVREINNYHHAHDAYLNAVVGTALIKKYPKLESEFVYGDYKVYDVRKMIAKSEQEIGKATAKRFFYSNIMNFFKTEITLANGEIRKRPLIETNEETGEIVWNKGRDFATVRKVLSMPQVNIVKKTEVQTGALTNESIYARGSFDKLISRKHRFESSKYGGFGSPTVTYSVLVVAKSKVQDGKVKKIKTGKELIGITLLDKLVFEKNPLKFIEDKGYGNVQIDKCIKLPKYSLFEFENGTRRMLASVMANNNSRGDLQKANEMFLPAKLVTLLYHAHKIESSKELEHEAYILDHYNDLYQLLSYIERFASLYVDVEKNISKVKELFSNIESYSISEICSSVINLLTLTASGAPADFKFLGTTIPRKRYGSPQSILSSTLIHQSITGLYETRIDLSQLGGD

SEQ ID NO: 596 - protein, 1370 aa, Streptococcus agalactiae SS1219; identical to SEQ ID NO: 580

SEQ ID NO: 597 - protein, 1345 aa, Streptococcus mutans NCTC 11060
MKKPYSIGLDIGTNSVGWAVVTDDYKVPAKKMKVLGNTDKSHIKKNLLGALLFDSGNTAEDRRLKRTARRRYTRRRNRILYLQEIFSEEMGKVDDSFFHRLEDSFLVTEDKRGERHPIFGNLEEEVKYHENFPTIYHLRQYLADNPEKTDLRLVYLALAHIIKFRGHFLIEGKFDTRNNDVQRLFQEFLAVYDNTFENSSLQEQNVQVEEILTDKISKSAKKDRVLKLFPNEKSNGRFAEFLKLIVGNQADFKKHFELEEKAPLQFSKDIYEEELEVLLAQIGDNYAELFLSAKKLYDSILLSGILTVTDVSTKAPLSASMIQRYNEHQMDLAQLKQFIRQKLSDKYNEVFSDVSKDGYAGYIDGKTNQEAFYKYLKGLLNKIEGSGYFLDKIEREDFLRKQRTFDNGSIPHQIHLQEMRAIIRRQAEFYPFLADNQDRIEKILTFRIPYYVGPLARGKSDFAWLSRKSADKITPWNFDEIVDKESSAEAFINRMTNYDLYLPNQKVLPKHSLLYEKFTVYNELTKVKYKTEQGKTAFFDANMKQEIFDGVFKVYRKVTKDKLMDFLEKEFDEFRIVDLTGLDKENKAFNASYGTYHDLRKILDKDFLDNSKNEKILEDIVLTLTLFEDREMIRKRLENYSDLLTKEQVKKLERRHYTGWGRLSAELIHGIRNKESRKTLLDYLIDDGNSNRNFMQLINDDALSFKEEIAKAQVIGETDNLNQVVSDIAGSPAIKKGILQSLKIVDELVKIMGHQPENIVVEMARENQFTNQGQRNSQQRLKGLTDSIKEFGSQILKEHPVENSQLQNDRLFLYYLQNGRDMYTGEELDIDYLSQYDIDHIIPQAFIKDNSIDNRVLTSSKENRGKSDDVPSKDVVRKMKSYWSKLLSAKLITQRKFDNLTKAERGGLTDDDKAGFIKRQLVETRQITKHVARILDERFNTETDENNKKIRQVKIVTLKSNLVSNFRKEFELYKVREINDYHHAHDAYLNAVIGKALLGVYPQLEPEFVYGDYPHFHGHKENKATAKKFFYSNIMNFFKKDDVRTDKNGEIIWKKDEYISNIKKVLSYPQVNIVKKVEEQTGGFSKESILPKGDSDKLIPRKTKKFYWDTKKYGGFDSPIVAYSILVIADIEKGKSKKLKTVKALVGVTIMEKMTFERDPVAFLERKGYRNVQEENIIKLPKYSLFKLENGRKRLLASARELQKGNEIVLPDHLGTLLYHAKNIHKVDEPKHLDYVDKHKDEFKELLDVVSNFSKKYTLAEGNLEKIKELYAQNNGEDLKELASSFINLLTFTAIGAPATFKFFDKNIDRKRYTSTTEILNATLIHQSITGLYETRIDLSKLGGD

SEQ ID NO: 598 - protein, 1345 aa, Streptococcus mutans 4SM1
MKKPYSIGLDIGTNSVGWAVVTDDYKVPAKKMKVLGNTDKSHIKKNLLGALLFDSGNTAEDRRLKRTARRRYTRRRNRILYLQEIFSEEMGKVDDSFFHRLEDSFLVTEDKRGERHPIFGNLEEEVKYHENFPTIYHLRQYLADNPEKVDLRLVYLALAHIIKFRGHFLIEGKFDTRNNDVQRLFQEFLAVYDNTFENSSLQEQNVQVEEILTDKISKSAKKDRVLKLFPNEKSNGRFAEFLKLIVGNQADFKKHFELEEKAPLQFSKDTYEEDLEELLGKIGDDYADLFTLAKNLYDAILLSGILTADDSSTKAPLSASMIQRYNEHQMDLAQLKQFIRQKLSDKYNEVFSDVSKDGYAGYIDGKTNQEAFYKYLKGLLNKIEGSGYFLDKIEREDFLRKQRTFDNGSIPHQIHLQEMRAIIRRQAEFYPFLADNQDRIEKILTFRIPYYVGPLARGKSDFAWLSRKSADKITPWNFDEIVDKESSAEAFINRMTNYDLYLPNQKVLPKHSLLYEKFTVYNELTKVKYKTEQGKTAFFDANMKQEIFDGVFKVYRKVTKDKLMDFLEKEFDEFRIVDLTGLDKENKVFNASYGTYHDLCKILDKDFLDNSKNEKILEDIVLTLTLFEDREMIRKRLENYSDLLTKEQVKKLERRHYTGWGRLSAELIHGIRNKESRKTILDYLIDDGNSNRNFMQLINDDALSFKEEIAKAQVIGETDNLNQVVSDIAGSPAIKKGILQSLKIVDELVKIMGHQPENIVVEMARENQFTNQGRRNSQQRLKGLTDSIKEFGSQILKEHPVENSQLQNDRLFLYYLQNGRDMYTGEELDIDYLSQYDIDHIIPQAFIKDNSIDNRVLTSSKENRGKSDDVPSKDVVRKMKPYWSKLLSAKLITQRKFDNLTKAERGGLTDDDKAGFIKRQLVETRQITKHVARILDERFNTETDENNKKIRQVKIVTLKSNLVSNFRKEFELYKVREINDYHHAHDAYLNAVIGKALLGVYPQLEPEFVYGDYPHFHGHEENKATAKKFFYSNIMNFFKKDDVRTDKNGEIIWKKDEHISNIKKVLSYPQVNIVKKVEEQTGGFSKESILPKGNSDKLIPRKTKKFYWDTKKYGGFDSPIVAYSILVIADIEKGKSKKLKTVKALVGVTIMEKMTFERDPVAFLERKGYRNVQEENIIKLPKYSLFKLENGRKRLLASARELQKGNEIVLPNHLGTLLYHAKNIHKVDEPKHLDYVDKHKDEFKELLDVVSNFSKKYTLAEGNLEKIKELYAQNNGEDLKELASSFINLLTFTAIGAPATFKFFDKNIDRKRYTSTTEILNATLIHQSITGLYETRIDLSKLGGD

SEQ ID NO: 599 - protein, 1377 aa, Streptococcus sanguinis SK115
MKKPYSIGLDIGTNSVGWAVITDDYKVPSKKMKVLGNTDKHFIKKNLIGALLFDEGTTAEDRRLKRTSRRRYTRRKNRLRYLQEIFSEEISKLDSSFFHRLDDSFLVPEDKRGSKYPIFATLEEEKEYHKKFPTIYHLRKHLADSKEKTDLRLIYLALAHMIKYRGHFLYEESFDIKNNDIQKIFNEFISIYDNTFEGSSLSGQNAQVEAIFTDKISKSTKRERVLKLFSDEKSTGLFSEFLKLIVGNQADFKKHFDLEEKAPLQFSKDTYDEDLENLLGQIGDGFADLFLVAKKLYDAILLSGILTVTDPSTKAPLSASMIERYENHQEDLAALKQFIKNNLSEKYAEVFSDQSKDGYAGFIDGKTTQEAFYKYIKNLLSKLEGADYFLNKIEREDFLRKQRTFDNGSIPHQIHLQEMNAILRRQGEHYLFLKENREKIEKILAFRIPYYVGPLARGNRDFAWLTRNSDQAIRPWNFEEVVDKASSAEDFINKMTNYDLYLPEEKVLPKHSLLYETFAVYNELTKVKFIAEGLRDYQFLDSGQKKQIVNQLFKDKRKVTEKDIIHYLHNVDGYDGIELKGIEKQFNASLSTYHDLLKIIKDKEFMDNPKNGEILENIIHTLTIFEDREMIKQRLAQYDTLFDEKVIKALTRRHYTGWGKLSAKLINGIRDKQTGKTILEYLIDDGDCNRNFMQLINDDGLSFKEIIQKAQVVGKTDDVKQVVQEIPGSPAIKKGILQSIKIVDELVKVMGHNPESIVIEMARENQTTAKGKKNSQQRYKRIEDALKNLAPGLDSNILKENPTDNIQLQNDRLFLYYLQNGKDMYTGKAIDINQLSNYDIDHIIPQAFIKDDSLDNRVLTSSKDNRGKSDNVPSIEVVQKRKAFWQQLLDSKLISERKFNNLTKAKRGGLDERDKVGFIKRQLVETRQITKHVAQLLDTRFNTEVNEENQKIRTVKIITLKSNLVSNFRKEFGLYKVREINDYHHAHDAYLNAVVAKAILKKYPKLEPEFVYGDYQKYDLKRYILKSKASNTIDKATEKYFFYSNLLNFFKEKVRYADGTIKKRENIEYSNDTGEIAWNKEKDFATIKKVLSLPQVNIVKKTEEQTVGQNGGLFDNNIVSKKKVVDASKLIPIKSSLSPEKYGGYARPTIAYSVLVIADIEKGKGKAKKLKRIKEIVGITIQDKKKFESNPVTYLEECGYKNINSNLIIKLPKYSLFEFNDGQRRLLASSIELQKGNELILPYHLTALLYHAQRINKISEPIHKQYVEAHQNEFKELLTTIISLSKKYIQKPNVELLLQQAFDQADKDIYQLSESFISLLKLTSFGAPGAFKFLGVEISQSSVRYKPNSQFLDTTLIHQSITGLYETRIDLSKLGED

SEQ ID NO: 600 - protein, 1345 aa, Streptococcus mutans 2VS1
MKKPYSIGLDIGTNSVGWAVVTDDYKVPAKKMKVLGNTDKSHIKKNLLGALLFDSGNTAADRRLKRTARRRYTRRRNRILYLQEIFAEEMSKVDDSFFHRLEDSFLVTEDKRGERHPIFGNLEEEVKYHENFPTIYHLRQYLADNPEKVDLRLVYLALAHIIKFRGHFLIEGKFDTRNNDVQRLFQEFLAVYDNTFENSSLQEQNVQVEEILTDKISKSAKKDRVLKLFPNEKSNGRFAEFLKLIVGNQADFKKHFELEEKAPLQFSKDTYEEELEVLLAQIGDNYAELFLSAKKLYDSILLSGILTVTDVSTKAPLSASMIQRYNEHQMDLAQLKQFIRQKLSDKYNEVFSDVSKDGYAGYIDGKTNQEAFYKYLKGLLNKIEGSGYFLDKIEREDFLRKQRTFDNGSIPHQIHLQEMRAIIRRQAEFYPFLADNQDRIEKILTFRIPYYVGPLARGKSDFAWLSRKSADKITPWNFDEIVDKESSAEAFINRMTNYDLYLPNQKVLPKHSLLYEKFTVYNELTKVKYKTEQGKTAFFDANMKQEIFDGVFKVYRKVTKDKLMDFLEKEFDEFRIVDLTGLDKENKAFNASYGTYHDLRKILDKDFLDNSKNEKILEDIVLTLTLFEDREMIRKRLENYSDLLTKEQVKKLERRHYTGWGRLSAELIHGIRNKESRKTILDYLIDDGNSNRNFMQLINDDALSFKEEIAKAQVIGETDNLNQVVSDIAGSPAIKKGILQSLKIVDELVKIMGHQPENIVVEMARENQFTNQGRRNSQQRLKGLTDSIKEFGSQILKEHPVEHSQLQNDRLFLYYLQNGRDMYTGEELDIDYLSQYDIDHIIPQAFIKDNSIDNRVLTSSKENRGKSDDVPSKNVVRKMKSYWSKLLSAKLITQRKFDNLTKAERGGLTDDDKAGFIKRQLVETRQITKHVARILDERFHTETDENNKKIRQVKIVTLKSNLVSNFRKEFELYKVREINDYHHAHDAYLNAVIGKALLGVYPQLEPEFVYGDYPHFHGHKENKATAKKFFYSNIMNFFKKDDVRTDKNGEIIWKKDEHISNIKKVLSYPQVNIVKKVEEQTGGFSKESILPKGNSDKLIPRKTKKFYWDTKKYGGFDSPIVAYSILVIADIEKGKSKKLKTVKALVGVTIMEKMTFERDPVAFLERKGYRNVQEENIIKLPKYSLFKLENGRKRLLASARELQKGNEIVLPNHLGTLLYHAKNIHKVDEPKHLDYVDKHKDEFKELLDVVSNFSKKYTLAEGNLEKIKELYAQNNGEDLKELASSFINLLTFTAIGAPATFKFFDKNIDRKRYTSTTEILNATLIHQSITGLYETRIDLSKLGGD

SEQ ID NO: 601 - protein, 1368 aa, Streptococcus pyogenes M1 476
MDKKYSIGLDIGTNSVGWAVITDDYKVPSKKFKVLGNTDRHSIKKNLIGALLFDSGETAEATRLKRTARRRYTRRKNRICYLQEIFSNEMAKVDDSFFHRLEESFLVEEDKKHERHPIFGNIVDEVAYHEKYPTIYHLRKKLVDSTDKADLRLIYLALAHMIKFRGHFLIEGDLNPDNSDVDKLFIQLVQTYNQLFEENPINASGVDAKAILSARLSKSRRLENLIAQLPGEKKNGLFGNLIALSLGLTPNFKSNFDLAEDAKLQLSKDTYDDDLDNLLAQIGDQYADLFLAAKNLSDAILLSDILRVNTEITKAPLSASMIKRYDEHHQDLTLLKALVRQQLPEKYKEIFFDQSKNGYAGYIDGGASQEEFYKFIKPILEKMDGTEELLVKLNREDLLRKQRTFDNGSIPHQIHLGELHAILRRQEDFYPFLKDNREKIEKILTFRIPYYVGPLARGNSRFAWMTRKSEETITPWNFEEVVDKGASAQSFIERMTNFDKNLPNEKVLPKHSLLYEYFTVYNELTKVKYVTEGMRKPAFLSGEQKKAIVDLLFKTNRKVTVKQLKEDYFKKIECFDSVEISGVEDRFNASLGTYHDLLKIIKDKDFLDNEENEDILEDIVLTLTLFEDREMIEERLKTYAHLFDDKVMKQLKRRRYTGWGRLSRKLINGIRDKQSGKTILDFLKSDGFANRNFMQLIHDDSLTFKEDIQKAQVSGQGDSLHEHIANLAGSPAIKKGILQTVKVVDELVKVMGRHKPENIVIEMARENQTTQKGQKNSRERMKRIEEGIKELGSQILKEHPVENTQLQNEKLYLYYLQNGRDMYVDQELDINRLSDYDVDHIVPQSFLKDDSIDNKVLTRSDKNRGKSDNVPSEEVVKKMKNYWRQLLNAKLITQRKFDNLTKAERGGLSELDKAGFIKRQLVETRQITKHVAQILDSRMNTKYDENDKLIREVKVITLKSKLVSDFRKDFQFYKVREINNYHHAHDAYLNAVVGTALIKKYPKLESEFVYGDYKVYDVRKMIAKSEQEIGKATAKYFFYSNIMNFFKTEITLANGEIRKRPLIETNGETGEIVWDKGRDFATVRKVLSMPQVNIVKKTEVQTGGFSKESILPKRNSDKLIARKKDWDPKKYGGFDSPTVAYSVLVVAKVEKGKSKKLKSVKELLGITIMERSSFEKNPIDFLEAKGYKEVKKDLIIKLPKYSLFELENGRKRMLASAGELQKGNELALPSKYVNFLYLASHYEKLKGSPEDNEQKQLFVEQHKHYLDEIIEQISEFSKRVILADANLDKVLSAYNKHRDKPIREQAENIIHLFTLTNLGAPAAFKYFDTTIDRKRYTSTKEVLDATLIHQSITGLYETRIDLSQLGGD

SEQ ID NO: 602 - protein, 1345 aa, Streptococcus mutans U2B
MKKPYSIGLDIGTNSVGWAVVTDDYKVPAKKMKVLGNTDKSHIEKNLLGALLFDSGNTAEDRRLKRTARRRYTRRRNRILYLQEIFSEEMGKVDDSFFHRLEDSFLVTEDKRGERHPIFGNLEEEVKYHENFPTIYHLRQYLADNPEKVDLRLVYLALAHIIKFRGHFLIEGKFDTRNNDVQRLFQEFLAVYDNTFENSSLQEQNVQVEEILTDKISKSAKKDRVLKLFPNEKSNGRFAEFLKLIVGNQADFKKHFELEEKAPLQFSKDTYEEELEVLLAQIGDNYAELFLSAKKLYDSILLSGILTVTDVGTKAPLSASMIQRYNEHQMDLAQLKQFIRQKLSDKYNEVFSDVSKDGYAGYIDGKTNQEAFYKYLKGLLNKIEGSGYFLDKIEREDFLRKQRTFDNGSIPHQIHLQEMRAIIRRQAEFYPFLADNQDRIEKLLTFRIPYYVGPLARGKSDFAWLSRKSADKITPWNFDEIVDKESSAEAFINRMTNYDLYLPNQKVLPKHSLLYEKFTVYNELTKVKYKTEQGKTAFFDANMKQEIFDGVFKVYRKVTKDKLMDFLEKEFDEFRIVDLTGLDKENKVFNASYGTYHDLCKILDKDFLDNSKNEKILEDIVLTLTLFEDREMIRKRLENYSDLLTKEQVKKLERRHYTGWGRLSAELIHGIRNKESRKTILDYLIDDGNSNRNFMQLINDDALSFKEEIAKAQVIGETDNLNQVVSDIAGSPAIKKGILQSLKIVDELVKIMGHQPENIVVEMARENQFTNQGRRNSQQRLKGLTDSIKEFGSQILKEHPVENSQLQNDRLFLYYLQNGRDMYTGEELDIDYLSQYDIDHIIPQAFIKDNSIDNRVLTSSKENRGKSDDVPSKDVVRKMKSYWSKLLSAKLITQRKFDNLTKAERGGLTDDDKAGFIKRQLVETRQITKHVARILDERFNTETDENNKKIRQVKIVTLKSNLVSNFRKEFELYKVREINDYHHAHDAYLNAVIGKALLGVYPQLEPEFVYGDYPHFHGHKENKATAKKFFYSNIMNFFKKDDVRTDKNGEIIWKKDEHISNIKKVLSYPQVNIVKKVEEQTGGFSKESILPKGNSDKLIPRKTKKFYWDTKKYGGFDSPIVAYSILVIADIEKGKSKKLKTVKALVGVTIMEKMTFERDPVAFLERKGYRNVQEENIIKLPKYSLFKLENGRKRLLASARELQKGNEIVLPNHLGTLLYHAKNIHKVDEPKHLDYVDKHKDEFKELLDVVSNFSKKYTLAEGNLEKIKELYAQNNGEDLKELASSFINLLTFTAIGAPATFKFFDKNIDRKRYTSTTEILNATLIHQSITGLYETRIDLNKLGGD

SEQ ID NO: 603 - protein, 1345 aa, Streptococcus mutans M2A
MKKPYSIGLDIGTNSVGWAVVTDDYKVPAKKMKVLGNTDKSHIKKNLLGALLFDSGNTAEDRRLKRTARRRYTRRRNRILYLQEIFSEEMGKVDDSFFHRLEDSFLVTEDKRGERHPIFGNLEEEVKYHENFPTIYHLRQYLADNPEKTDLRLVYLALAHIIKFRGHFLIEGKFDTRNNDVQRLFQEFLAVYDNTFENSSLQEQNVQVEEILTDKISKSAKKDRVLKLFPNEKSNGRFAEFLKLIVGNQADFKKHFELEEKAPLQFSKDIYEEELEVLLAQIGDNYAELFLSAKKLYDSILLSGILTVTDVSTKAPLSASMIQRYNEHQMDLAQLKQFIRQKLSDKYNEVFSDVSKDGYAGYIDGKTNQEAFYKYLKGLLNKIEGSGYFLDKIEREDFLRKQRTFDNGSIPHQIHLQEMRAIIRRQAEFYPFLADNQDRIEKILTFRIPYYVGPLARGKSDFAWLSRKSADKITPWNFDEIVDKESSVEAFINRMTNYDLYLPNQKVLPKHSLLYEKFTVYNELTKVKYKTEQGKTAFFDANMKQEIFDGVFKVYRKVTKDKLMDFLEKEFDEFRIVDLTGLDKENKAFNASYGTYHDLRKILDKDFLDNSKNEKILEDIVLTLTLFEDREMIRKRLKNYSDLLTKEQLKKLERRHYTGWGRLSAELIHGIRNKESRKTILDYLIDDGNSNRNFMQLINDDALSFKEEIAKAQVIGETDNLNQVVSDIAGSPAIKKGILQSLKIVDELVKIMGHQPENIVVEMARENQFTNQGRRNSQQRLKGLTDSIKEFGSQILKEHPVENSQLQNDRLFLYYLQNGRDMYTGEELDIDYLSQYDIDHIIPQAFIKDNSIDNRVLTSSKENRGKSDDVPSKDVVRKMKSYWSKLLSAKLITQRKFDNLTKAERGGLTDDDKAGFIKRQLVETRQITKHVARILDERFNTETDENNKKIRQVKIVTLKSNLVSNFRKEFELYKVREINDYHHAHDAYLNAVIGKALLGVYPQLEPEFVYGDYPHFHGHKENKATAKKFFYSNIMNFFKKDDVRTDKNGEIIWKKDEHISNIKKVLSYPQVNIVKKVEEQTGGFSKESILPKGNSYKLIPRKTKKFYWDTKKYGGFDSPIVAYSILVIADIEKGKSKKLKTVKALVGVTIMEKMTFERDPVAFLERKGYRNVQEENIIKLPKYSLFKLENGRKRLLASARELQKGNEIVLPNHLGTLLYHAKNIHKVDEPKHLDYVDKHKDEFKELLDVVSNFSKKYTLAEGNLEKIKELYAQNNGEDLKELASSFINLLTFTAIGAPAAFKFFDKNIDRKRYTSTTEILNATLIHQSITGLYETRIDLSKLGGD

SEQ ID NO: 604 - protein, 1359 aa, Streptococcus mutans 66-2A
MKKPYSIGLDIGTNSVGWAVVTDDYKVPAKKMKVLGNTDKSHIKKNLLGALLFDSGNTAEDRRLKRTARRRYTRRRNRILYLQEIFAEEMMQVDESFFQRLDDSFLVEEDKRGSRYPIFGTLKEEKKYHKEFKTIYHLREKLANSTEKADLRLVYLSLAHMIKFRGHFLIEGQLKAENTNVQALFKDFVEVYDKTVEESHLSEMTVDALSILTEKVSKSRRLENLVECYPTEKKNTLFGNLIALSLGLQPNFKTNFQLSEDAKLQFSKDTYEEDLEGLLGEIGDEYADLFASAKNLYDAILLSGILAVDDNTTKAPLSASMVKRYKEHKEELAAFKRFIKEKLPKKYEEIFKDDTKNGYAGYVGADKKLRKRSGKLATEEEFYKYVKGILNKVEGADVWLDKIDREDFLRKQRTFDNGSIPHQIHLQEMHAILRRQGEHYPFLKENQDKIEKILTFRIPYYVGPLVRKGSRFAWAEYKADEKITPWNFDDILDKEKSAEKFITRMTLNDLYLPEEKVLPKHSLLYETFTVYNELTKVKYVNEQGEAKFFDANMKQEIFDHVFKENRKVTKDKLLNYLNKEFEEFRIVNLTGLDKENKVFNSSLGTYHDLRKILNKSFLDNKENEQIIEDIIQTLTLFEDREMIRQRLQKYSDIFTKAQLKKLERRHYTGWGRLSYKLINGIRDKQSNKTILGYLIDDGYSNRNFMQLINDDALSFKEEIAKAQVIGEMDGLNQVVSDIAGSPAIKKGILQSLKIVDELVKVMGHNPANIVIEMARENQTTAKGRRSSQKRYKRLEEAIKNLDHDLNHKILKEHPTDNQALQNDRLFLYYLQNGRDMYTEDPLDINRLSDYDIDHIIPQAFIKDNSIDNRVLTRSDKNRGKSDDVPSEEVVHKMKPFWSKLLSAKLITQRKFDNLTKAERGGLTDDDKAGFIKRQLVETRQITKHVARILDERFNTETDENNKKIRQVKIVTLKSNLVSNFRKEFELYKVREINDYHHAHDAYLNAVIGKALLGVYPQLEPEFVYGDYPHFHGHKENKATAKKFFYSNIMNFFKKGDVRTDKNGEIIWKKDEHISNIKKVLSYPQVNIVKKVEEQTGGFSKESILPKGNSDKLIPRKTKKFYWDTKKYGGFDSPIVAYSILVIADIEKGKSKKLKTVKALVGVTIMEKMTFERDPVAFLERKGYRNVQEENIIKLPKYSLFKLENGRKRLLASARELQKGNEIVLPNHLETLLYHAKNIHKVDEPKHLDYVDKHKDEFKELLDVVSNFSKKYTLAEGNLEKIKELYAQNNGEDLKELASSFINLLTFTAIGAPAAFKFFDKNIDRKRYTSTTEILNATLIHQSITGLYETRIDLNKLGGD

SEQ ID NO: 605 - protein, 1345 aa, Streptococcus mutans NLML9
MKKPYSIGLDIGTNSVGWAVVTDDYKVSAKKMKVLGNTDKSHIKKNLLGALLFDSGNTAEDRRLKRTARRRYTRRRNRILYLQEIFAEEMSKVDDSFFHRLEDSFLVTEDKRGERHPIFGNLEEEVKYHENFPTIYHLRQYLADNPEKVDLRLVYLALAHIIKFRGHFLIEGKFDTRNNDVQRLFQEFLAVYDNTFENSSLQEQNVQVEEILTDKISKSAKKDRVLKLFPNEKSNGRFAEFLKLIVGNQADFKKHFELEEKAPLQFSKDTYEEELEVLLAQIGDNYAELFLSAKKLYDSILLSGILTVTDVSTKAPLSASMIQRYNEHQMDLAQLKQFIRQKLSDKYNEVFSDVSKDGYAGYIDGKTNQEAFYKYLKGLLNKIEGSGYFLDKIEREDFLRKQRTFDNGSIPHQIHLQEMRAIIRRQAEFYPFLADNQDRIEKILTFRIPYYVGPLARGKSDFAWLSRKSADKITPWNFDEIVDKESSAEAFINRMTNYDLYLPNQKVLPKHSLLYEKFTVYNELTKVKYKTEQGKTAFFDANMKQEIFDGVFKVYRKVTKDKLMDFLEKEFDEFRIVDLTGLDKENKAFNASYGTYHDLRKILDKDFLDNSKNEKILEDIVLTLTLFEDREMIRKRLENYSDLLTKEQVKKLERRHYTGWGRLSAELIHGIRNKESRKTILDYLIDDGNSNRNFMQLINDDALSFKEEIAKAQVIGETDNLNQVVSDIAGSPAIKKGILQSLKIVDELVKIMGHQPENIVVEMARENQFTNQGRRNSQQRLKGLTDSIKEFGSQILKEHPVEHSQLQNDRLFLYYLQNGRDMYTGEELDIDYLSQYDIDHIIPQAFIKDNSIDNRVLTSSKENRGKSDDVPSKNVVRKMKSYWSKLLSAKLITQRKFDNLTKAERGGLTDDDKAGFIKRQLVETRQITKHVARILDERFHTETDENNKKIRQVKIVTLKSNLVSNFRKEFELYKVREINDYHHTHDAYLNAVIGKALLGVYPQLEPEFVYGDYPHFHGHKENKATAKKFFYSNIMNFFKKDDVRTDKNGEIIWKKDEHISNIKKVLSYPQVNIVKKVEEQTGGFSKESILPKGNSDKLIPRKTKKFYWDTKKYGGFDSPIVAYSILVIADIEKGKSKKLKTVKALVGVTIMEKMTFERDPVAFLERKGYRNVQEENIIKLPKYSLFKLENGRKRLLASARELQKGNEIVLPNHLGTLLYHAKNIHKVDEPKHLDYVDKHKDEFKELLDVVSNFSKKYTLAEGNLEKIKELYAQNNGEDLKELASSFINLLTFTAIGAPATFKFFDKNIDRKRYTSTTEILNATLIHQSITGLYETRIDLSKLGGD

SEQ ID NO: 606 - protein, 1345 aa, Streptococcus mutans 4VF1
MKKPYSIGLDIGTNSVGWAVVTDDYKVPAKKMKVLGNTDKSHIKKNLLGALLFDSGNTAEDRRLKRTARRRYTRRRNRILYLQEIFSEEMGKVDDSFFHRLEDSFLVTEDKRGERHPIFGNLEEEVKYHENFPTIYHLRQYLADNPEKVDLRLVYLALAHIIKFRGHFLIEGKFDTRNNDVQRLFQEFLAVYDNTFENSSLQEQNVQVEEILTDKISKSAKKDRVLKLFPNEKSNGRFAEFLKLIVGNQADFKKHFELEEKAPLQFSKDTYEEELEVLLAQIGDNYAELFLSAKKLYDSILLSGILTVTDVSTKAPLSASMIQRYNEHQMDLAQLKQFIRQKLSDKYNEVFSDVSKDGYAGYIDGKTNQEAFYKYLKGLLNKIEGSGYFLDKIEREDFLRKQRTFDNGSIPHQIHLQEMRAIIRRQAEFYPFLADNQDRIEKILTFRIPYYVGPLARGKSDFAWLSRKSADKITPWNFDEIVDKESSAEAFINRMTNYDLYLPNQKVLPKHSLLYEKFTVYNELTKVKYKTEQGKTAFFDANMKQEIFDGVFKVYRKVTKDKLMDFLEKEFDEFRIVDLTGLDKENKVFNASYGTYHDLCKILDKDFLDNSKNEKILEDIVLTLTLFEDREMIRKRLENYSDLLTKEQVKKLERRHYTGWGRLSAELIHGIRNKESRKTILDYLIDDGNSNRNFMQLINDDALSFKEEIAKAQVIGETDNLNQVVSDIAGSPAIKKGILQSLKIVDELVKIMGHQPENIVVEMARENQFTKQGRRNSQQRLKGLTDSIKEFGSQILKEHPVENSQLQNDRLFLYYLQNGRDMYTGEELDIDYLSQYDIDHIIPQAFIKDNSIDNRVLTSSKENRGKSDDVPSKDVVRKMKSYWSKLLSAKLITQRKFDNLTKAERGGLTDDDKAGFIKRQLVETRQITKHVARILDERFYTETDENNKKIRQVKIVTLKSNLVSNFRKEFELYKVREINDYHHAHDAYLNAVIGKALLGVYPQLEPEFVYGDYPHFHGHKENKATAKKFFYSNIMNFFKKDDVRTDRNGEIIWKKDEHISNIKKVLSYPQVNIVKKVEEQTGGFSKESILPKGNSDKLIPRKTKKFYWDTKKYGGFDSPIVAYSILVIADIEKGKSKKLKTVKALVGVTIMEKMTFERDPVAFLERKGYRNVQEENIIKLPKYSLFKLENGRKRLLASARELQKGNEIVLPNHLGTLLYHAKNIHKVDEPKHLDYVDKHKDEFKELLDVVSNFSKKYTLAEGNLEKIKELYAQNNGEDLKELASSFINLLTFTAIGAPATFKFFDKNIDRKRYTSTTEILNATLIHQSITGLYETRIDLSKLGGD

SEQ ID NO: 607 - protein, 1345 aa, Streptococcus mutans N66
MKKPYSIGLDIGTNSVGWAVVTDDYKVPAKKMKVLGNTDKSHIKKNLLGALLFDSGNTAEDRRLKRTARRRYTRRRNRILYLQEIFSEEMGKVDDSFFHRLEDSFLVTEDKRGERHPIFGNLEEEVKYHENFPTIYHLRQYLADNPEKTDLRLVYLALAHIIKFRGHFLIEGKFDTRNNDVQRLFQEFLAVYDNTFENSSLQEQNVQVEEILTDKISKSAKKDRVLKLFPNEKSNGRFAEFLKLIVGNQADFKKHFELEEKAPLQFSKDIYEEELEVLLAQIGDNYAELFLSAKKLYDSILLSGILTVTDVSTKAPLSASMIQRYNEHQMDLAQLKQFIRQKLSDKYNEVFSDVSKDGYAGYIDGKTNQEAFYKYLKGLLNKIEGSGYFLDKIEREDFLRKQRTFDNGSIPHQIHLQEMRAIIRRQAEFYPFLADNQDRIEKILTFRIPYYVGPLARGKSDFAWLSRKSADKITPWNFDEIVDKESSAEAFINRMTNYDLYLPNQKVLPKHSLLYEKFTVYNELTKVKYKTEQGKTAFFDANMKQEIFDGVFKVYRKVTKDKLMDFLEKEFDEFRIVDLTGLDKENKAFNASYGTYHDLRKILDKDFLDNSKNEKILEDIVLTLTLFEDREMIRKRLKNYSDLLTKEQLKKLERRHYTGWGRLSAELIHGIRNKESRKTILDYLIDDGNSNRNFMQLINDDALSFKEEIAKAQVIGETDNLNQVVSDIAGSLAIKKGILQSLKIVDELVKIMGHQPENIVVEMARENQFTNQGRRNSQQRLKGLTDSIKEFGSQILKEHPVENSQLQNDRLFLYYLQNGRDMYTGEELDIDYLSQYDIDHIIPQAFIKDNSIDNRVLTSSKENRGKSDDVPSKDVVRKMKSYWSKLLSAKLITQRKFDNLTKGERGGLTDDDKAGFIKRQLVETRQITKHVARILDERFNTETDENNKKIRQVKIVTLKSNLVSNFRKEFELYKVREINDYHHAHDAYLNAVIGKALLGVYPQLEPEFVYGDYPHFHGHKENKATAKKFFYSNIMNFFKKDDVRTDKNGEIIWKKDEYISNIKKVLSYPQVNIVKKVEEQTGGFFKESILPKGDSDKLIPRKTKKFYWDTKKYGGFDSPIVAYSILVIADIEKGKSKKLKTVKALVGVTIMEKMTFERDPVAFLERKGYRNVQEENIIKLPKYSLFKLENGRKRLLASARELQKGNEIVLPNHLGTLLYHAKNIHKVDEPKHLDYVDKHKDEFKELLDVVSNFSKKYTLAEGNLEKIKELYAQNNGEDLKELASSFINLLTFTAIGAPATFKFFDKNIDRKRYTSTTEILNATLIHQSITGLYETRIDLSKLGGD

SEQ ID NO: 608 - protein, 1374 aa, Streptococcus pseudoporcinus LQ 940-04
MKKRYSYSIGLDIGTNSVGWAVINEDYKVPAKKMTVFGNTDRKTIKKNLLGTVLFDSGETAQARRLKRTNRRRYTRRRYRLCQLQNIFATEMVKVDDTFFQRLSESFFYYQDKAFDKHPIFGNSKEERAYHKTYPTIYHLRKDLADRDQKADLRLIYLALSHIIKFRGHFLIEGKLNSENTDVQKLFIALVTVYNLLFEEEPIAGETCDAKALLTAKTSKSKRLESLISEFPGQKKNGLFGNLLALALGLRPNFKSNFGLSEDAKLQITKDTYEEELDNLLAEIGDHYADLFLAAKNLSDAILLSDILTLSDENTRAPLSASMIKRYEEHQEDLALLKKLVKEQMPEKYWEIFSNAKKNGYAGYIEGKVSQEDFYRYIKPILSRLKGGDEFLAKIDRDDFLRKQRTFDNGSIPHQIHLKELHAILRRQEKYYPFLAEQKEKIEQLLCFRIPYYVGPLAKGGNSSFAWLKRRSDEPITPWNFKDVVDEEASAQAFIEGMTNYDTYLPEEKVLPKHSPLYEMFTVYNELTKVKYIAENMTKPLYLSAEQKEAIIDHLFKQTRKVTVKDLKEKYFSQIEGLENVDVTGVEGAFNASLGTYNDLLKIIKDKAFLDDEANAEILEEIVLILTLFQDEKLIEKRLAKYANLFEKSVLKKLRKRHYRGWGRLSRQLIDGMKDKASGKTILDFLKADDFANRNFIQLINDSSLDFEKLIDDAQKKAIKRESLTEAVANLAGSPAIKKGILQSLKVVDEIVKVMGHNPDNIVIEMSRENQTTAQGLKNARQRLKKIKEVHKKTGSRILEDNSERITNLTLQDNRLYLYLLQDGKDMYTGQDLDINNLSQYDIDHIIPQSFIKDNSIDNLVLTTQKANRGKSDNVPSIEVVRDMKDRVWRRQLANGAISRQKFDHLTKAERGGLADSDKARFLRRQLVETRQITKHVAQLLDSRFNSKSNQNKKLARNVKIITLKSKIVSDFRKDFGLYKLREVNNYHHAHDAYLNAVVGTALLKKYPKLEAEFVYGDYKHFDLVKLISKSDPSLGKATAKVFFYSNIMNFFKEELSLADGTLMKRPVIETNTETGEVVWDKVKDFKTIRKVLSYPQVNIVKKTEIQSGAFSKESVLSKGNSDKLIERKKGWDPKKYGGFDSPNTAYSIFVVAKVAKRKAQKLKTVKEIVGITIMEQAEYEKDNIAFLEKKGYQDIQEKLLIKLPKYSLFELENGRRRLLASANEFQKGNELALSGKYMKFLYLASRYDKLSSKIESEQQKKLFVEQHLHYFDEILDIVVKHATCYIKAENNLKKIISLYKKKEAYSINEQALNMLNLFIFTSLGAPSTFVFFDETIDRKRYTTSSDVLNGILIQQSITGLYETRIDLSRFGGD

SEQ ID NO: 609 - protein, 1345 aa, Streptococcus mutans 11VS1
MKKPYSIGLDIGTNSVGWAVVTDDYKVPAKKMKVLGNTDKSHIKKNLLGALLFDSGNTAEDRRLKRTARRRYTRRRNRILYLQEIFSEEMGKVDDSFFHRLEDSFLVTEDKRGERHPIFGNLEEEVKYHENFPTIYHLRQYLADNPEKVDLRLVYLALAHIIKFRGHFLIEGKFDTRNNDVQRLFQEFLAVYDNTFENSSLQEQNVQVEEILTDKISKSAKKDRVLKLFPNEKSNGRFAEFLKLIVGNQADFKKHFELEEKAPLQFSKDTYEEELEVLLAQIGDNYAELFLSAKKLYDSILLSGILTVTDVSTKAPLSASMIQRYNEHQMDLAQLKQFIRQKLSDKYNEVFSDVSKDGYAGYIDGKTNQEAFYKYLKGLLNKIEGSGYFLDKIEREDFLRKQRTFDNGSIPHQIHLQEMRAIIRRQAEFYPFLADNQDRIEKILTFRIPYYVGPLARGKSDFAWLSRKSADKITPWNFDEIVDKESSAEAFINRMTNYDLYLPNQKVLPKHSLLYEKFTVYNELTKVKYKTEQGKTAFFDANMKQEIFDGVFKVYRKVTKDKLMDFLEKEFDEFRIVDLTGLDKENKVFNASYGTYHDLCKILDKDFLDNSKNEKILEDIVLTLTLFEDREMIRKRLENYSDLLTKEQVKKLERRHYTGWGRLSAELIHGIRNKESRKTILDYLIDDGNSNRNFMQLINDDALSFKEEIAKAQVIGETDNLNQVVSDIAGSPAIKKGILQSLKIVDELVKIMGHQPENIVVEMARENQFTKQGRRNSQQRLKGLTDSIKEFGSQILKEHPVENSQLQNDRLFLYYLQNGRDMYTGEELDIDYLSQYDIDHIIPQAFIKDNSIDNRVLTSSKENRGKSDDVPSKDVVRKMKSYWSKLLSAKLITQRKFDNLTKAERGGLTDDDKAGFIKRQLVETRQITKHVARILDERFYTETDENNKKIRQVKIVTLKSNLVSNFRKEFELYKVREINDYHHAHDAYLNAVIGKALLGVYPQLEPEFVYGDYPHFHGHKENKATAKKFFYSNIMNFFKKDDVRTDKNGEIIWKKDEHISNIKKVLSYPQVNIVKKVEEQTGGFSKESILPKGNSDKLIPRKTKKFYWDTKKYGGFDSPIVAYSILVIADIEKGKSKKLKTVKALVGVTIMEKMTFERDPVAFLERKGYRNVQEENIIKLPKYSLFKLENGRKRLLASARELQKGNEIVLPNHLGTLLYHAKNIHKVDEPKHLDYVDKHKDEFKELLDVVSNFSKKYTLAEGNLEKIKELYAQNNGEDLKELASSFINLLTFTAIGAPATFKFFDKNIDRKRYTSTTEILNATLIHQSITGLYETRIDLSKLGGD

SEQ ID NO: 610 - protein, 1229 aa, Streptococcus mutans SA38
MKKPYSIGLDIGTNSVGWAVVTDDYKVPAKKMKVLGNTDKSHIEKNLLGALLFDSGNTAEDRRLKRTARRRYTRRRNRILYLQEIFSEEMGKVDDSFFHRLEDSFLVTEDKRGERHPIFGNLEEEVKYHENFPTIYHLRQYLADNPEKVDLRLVYLALAHIIKFRGHFLIEGKFDTRNNDVQRLFQEFLAVYDNTFENSSLQEQNIQVEEILTDKISKSAKKDRVLKLFPNEKSNGRFAEFLKLIVGNQADFKKHFELEEKAPLQFSKDTYEEELEVLLAQIGDNYAELFLSAKKLYDSILLSGILTVTDVGTKAPLSASMIQRYNEHQMDLTQLKQFIRQKLSDKYNEVFSDVSKDGYAGYIDGKTNQEAFYKYLKGLLNKIEGSGYFLDKIEREDFLRKQRTFDNGSIPHQIHLQEMRAIIRRQAEFYPFLADNQDRIEKILTFRIPYYVGPLARGKSDFAWLSRKSADKITPWNFDEIVDKESSAEAFINRMTNYDLYLPNQKVLPKHSLLYEKFTVYNELTKVKYKTEQGKTAFFDANMKQEIFDGVFKVYRKVTKDKLMDFLEKEFDEFRIVDLTGLDKENKVFNASYGTYHDLCKILDKDFLDNSKNEKILEDIVLTLTLFEDREMIRKRLENYSDLLTKEQVKKLERRHYTGWGRLSAELIHGIRNKESRKTILDYLIDDGNSNRNFMQLINDDALSFKEEIAKAQVIGETDNLNQVVSDIAGSPAIKKGILQSLKIVDELVKIMGHQPENIVVEMARENQFTNQGRRNSQQRLKGLTDSIKEFGSQILKEHPVENSQLQNDRLFLYYLQNGRDMYTGEELDIDYLSQYDIDHIIPQAFIKDNSIDNRVLTSSKENRGKSDDVPSKDVVRKMKPYWSKLLSAKLITQRKFDNLTKAERGGLTDDDKAGFIKRQLVETRQITKHVARILDERFNTETDENNKKIRQVKIVTLKSNLVSNFRKEFELYKVREINDYHHAHDAYLNAVIGKALLGVYPQLEPEFVYGDYPHFHGHEENKATAKKFFYSNIMNFFKKDDVRTDKNGEIIWKKDEHISNIKKVLSYPQVNIVKKVEEQTIGQNGGLFDDNPKSPLEVIPSKLVPLKKALNPEKYGGYQKPTTAYPILLIVDTKQLIPISVMDKKRFEQNPVKFLKDKGYQQIEKNNFVKLPKYTLVDIGNGIKRLWASSKEVHKGNQLVVSKKSQDLLYHAHHLDNDYSNEYVKNHY

SEQ ID NO: 611 - protein, 1368 aa, Streptococcus pyogenes A20; identical to SEQ ID NO: 601

SEQ ID NO: 612 - protein, 1345 aa, Streptococcus mutans A9
MKKPYSIGLDIGTNSVGWAVVTDDYKVPAKKMKVLGNTDKSHIKKNLLGALLFDSGNTAEDRRLKRTARRRYTRRRNRILYLQEIFSEEMGKVDDSFFHRLDESFLTDDDKNFDSHPIFGNKAEEDAYHQKFPTIYHLRKHLADSTEKADLRLVYLALAHMIKFRGHFLIEGELNAENTDVQKLFADFVGVYDRTFDDSHLSEITVDASSILTEKISKSRRLEKLINNYPKEKKNTLFGNLIALSLGLQPNFKTNFKLSEDAKLQFSKDTYEEELEVLLAQIGDNYAELFLSAKKLYDSILLSGILTVTDVSTKAPLSASMIQRYNEHQMDLAQLKQFIRQKLSDKYNEVFSDVSKDGYAGYIDGKTNQEAFYKYLKGLLNKIEGSGYFLDKIEREDFLRKQRTFDNGSIPHQIHLQEMRAIIRRQAEFYPFLADNQDRIEKILTFRIPYYVGPLARGKSDFAWLSRKSADKITPWNFDEIVDKESSVEAFINRMTNYDLYLPNQKVLPKHSLLYEKFTVYNELTKVKYKTEQGKTAFFDANMKQEIFDGVFKVYRKVTKDKLMDFLEKEFDEFRIVDLTGLDKENKAFNASYGTYHDLRKILDKDFLDNSKNEKILEDIVLTLTLFEDREMIRKRLKNYSDLLTKEQLKKLERRHYTGWGRLSAELIHGIRNKESRKTILDYLIDDGNSNRNFMQLINDDALSFKEEIAKAQVIGETDNLNQVVSDIAGSPAIKKGILQSLKIVDELVKIMGHQPENIVVEMARENQFTNQGRRNSQQRLKGLTDSIKEFGSQILKEHPVENSQLQNDRLFLYYLQNGRDMYTGEELDIDYLSQYDIDHIIPQAFIKDNSIDNRVLTSSKENRGKSDDVPSKDVVRKMKSYWSKLLSAKLITQRKFDNLTKGERGGLTDDDKAGFIKRQLVETRQITKHVARILDERFNTETDENNKKIRQVKIVTLKSNLVSNFRKEFELYKVREINDYHHAHDAYLNAVIGKALLGVYPQLEPEFVYGDYPHFHGHKENKATAKKFFYSNIMNFFKKDDVRTDKNGEIIWKKDEYISNIKKVLSYPQVNIVKKVEEQTGGFSKESILPKGDSDKLIPRKTKKFYWDTKKYGGFDSPIVAYSILVIADIEKGKSKKLKTVKALVGVTIMEKMTFERDPVAFLERKGYRNVQEENIIKLPKYSLFKLENGRKRLLASARELQKGNEIVLPNHLGTLLYHAKNIHKVDEPKHLDYVDKHKDEFKELLDVVSNFSKKYTLAEGNLEKIKELYAQNNGEDLKELASSFINLLTFTAIGAPATFKFFDKNIDRKRYTSTTEILNATLIHQSITGLYETRIDLSKLGGD

SEQ ID NO: 613 - protein, 1345 aa, Streptococcus mutans SM4
MKKPYSIGLDIGTNSVGWAVVTDDYKVPAKKMKVLGNTDKSHIKKNLLGALLFDSGNTAEDRRLKRTARRRYTRRRNRILYLQEIFSEEMDKVDDSFFHRLEDSFLVTEDKRGERHPIFGNLEEEVKYHENFPTIYHLRQYLADNPEKVDLRLVYLALAHIIKFRGHFLIEGKFDTRNNDVQRLFQEFLAVYDNTFENSSLQEQNVQVEEILTDKISKSAKKDRVLKLFPNEKSNGRFAEFLKLIVGNQADFKKHFELEEKAPLQFSKDTYEEELEVLLAQIGDNYAELFLSAKKLYDSILLSGILTVTDVSTKAPLSASMIQRYNEHQMDLAQLKQFIRQKLSDKYNEVFSDVSKDGYAGYIDGKTNQEAFYKYLKGLLNKIEGSGYFLDKIEREDFLRKQRTFDNGSIPHQIHLQEMRAIIRRQAEFYPFLADNQDRIEKILTFRIPYYVGPLARGKSDFAWLSRKSADKITPWNFDEIVDKESSAEAFINRMTNYDLYLPNQKVLPKHSLLYEKFTVYNELTKVKYKTEQGKTAFFDANMKQEIFDGVFKVYRKVTKDKLMDFLEKEFDEFRIVDLTGLDKENKVFNASYGTYHDLCKILDKDFLDNSKNEKILEDIVLTLTLFEDREMIRKRLENYSDLLTKEQVKKLERRHYTGWGRLSAELIHGIRNKESRKTILDYLIDDGNSNRNFMQLINDDALSFKEEIAKAQVIGETDNLNQVVSDIAGSPAIKKGILQSLKIVDELVKIMGHQPENIVVEMARENQFTKQGRRNSQQRLKGLTDSIKEFGSQILKEHPVENSQLQNDRLFLYYLQNGRDMYTGEELDIDYLSQYDIDHIIPQAFIKDNSIDNRVLTSSKENRGKSDDVPSKDVVRKMKSYWSKLLSAKLITQRKFDNLTKAERGGLTDDDKAGFIKRQLVETRQITKHVARILDERFYTETDENNKKIRQVKIVTLKSNLVSNFRKEFELYKVREINDYHHAHDAYLNAVIGKALLGVYPQLEPEFVYGDYPHFHGHKENKATAKKFFYSNIMNFFKKDDVRTDKNGEIIWKKDEHISNIKKVLSYPQVNIVKKVEEQTGGFSKESILPKGNSDKLIPRKTKKFYWDTKKYGGFDSPIVAYSILVIADIEKGKSKKLKTVKALVGVTIMEKMTFERDPVAFLERKGYRNVQEENIIKLPKYSLFKLENGRKRLLASARELQKGNEIVLPNHLGTLLYHAKNIHKVDEPKHLDYVDKHKDEFKELLDVVSNFSKKYTLAEGNLEKIKELYAQNNGEDLKELASSFINLLTFTAIGAPATFKFFDKNIDRKRYTSTTEILNATLIHQSITGLYETRIDLSKLGGD

SEQ ID NO: 614 - protein, 1345 aa, Streptococcus mutans KK21; identical to SEQ ID NO: 602

SEQ ID NO: 615 - protein, 1345 aa, Streptococcus mutans M21
MKKPYSIGLDIGTNSVGWAVVTDDYKVPAKKMKVLGNTDKSHIKKNLLGALLFDSGNTAEDRRLKRTARRRYTRRRNRILYLQEIFSEEMGKVDDSFFHRLEDSFLVTEDKRGERHPIFGNLEEEVKYHENFPTIYHLRQYLADNPEKTDLRLVYLALAHIIKFRGHFLIEGKFDTRNNDVQRLFQEFLAVYDNTFENSSLQEQNVQVEEILTDKISKSAKKDRVLKLFPNEKSNGRFAEFLKLIVGNQADFKKHFELEEKAPLQFSKDIYEEELEVLLAQIGDNYAELFLSAKKLYDSILLSGILTVTDVSTKAPLSASMIQRYNEHQMDLAQLKQFIRQKLSDKYNEVFSDVSKDGYAGYIDGKTNQEAFYKYLKGLLNKIEGSGYFLDKIEREDFLRKQRTFDNGSIPHQIHLQEMRAIIRRQAEFYPFLADNQDRIEKILTFRIPYYVGPLARGKSDFAWLSRKSADKITPWNFDEIVDKESSVEAFINRMTNYDLYLPNQKVLPKHSLLYEKFTVYNELTKVKYKTEQGKTAFFDANMKQEIFDGVFKVYRKVTKDKLMDFLEKEFDEFRIVDLTGLDKENKAFNASYGTYHDLRKILDKDFLDNSKNEKILEDIVLTLTLFEDREMIRKRLKNYSDLLTKEQLKKLERRHYTGWGRLSAELIHGIRNKESRKTILDYLIDDGNSNRNFMQLINDDALSFKEEIAKAQVIGETDNLNQVVSDIAGSPAIKKGILQSLKIVDELVKIMGHQPENIVVEMARENQFTNQGRRNSQQRLKGLTDSIKEFGSQILKEHPVENSQLQNDRLFLYYLQNGRDMYTGEELDIDYLSQYDIDHIIPQAFIKDNSIDNRVLTSSKENRGKSDDVPSKNVVRKMKSYWSKLLSAKLITQRKFDNLTKAERGGLTDDDKAGFIKRQLVETRQITKHVARILDERFHTETDENNKKIRQVKIVTLKSNLVSNFRKEFELYKVREINDYHHAHDAYLNAVIGKALLGVYPQLEPEFVYGDYPHFHGHKENKATAKKFFYSNIMNFFKKDDVRTDKNGEIIWKKDEHISNIKKVLSYPQVNIVKKVEEQTGGFSKESILPKGNSDKLIPRKTKKFYWDTKKYGGFDSPIVAYSILVIADIEKGKSKKLKTVKALVGVTIMEKMTFERDPVAFLERKGYRNVQEENIIKLPKYSLFKLENGRKRLLASARELQKGNEIVLPNHLGTLLYHAKNIHKVDEPKHLDYVDKHKDEFKELLDVVSNFSKKYTLAEGNLEKIKELYAQNNGEDLKELASSFINLLTFTAIGAPATFKFFDKNIDRKRYTSTTEILNATLIHQSITGLYETRIDLSKLGGD

SEQ ID NO: 616 - protein, 611 aa, Streptococcus dysgalactiae subsp. equisimilis SK1249
KSRRLENLIAQLPGEKKNGLFGNLIALSLGLTPNFKSNFDLAEDAKLQLSKDTYDDDLDNLLAQIGDQYADLFLAAKNLSDATLLSDILRVNSEITKAPLSASMIKRYDEHHQDLTLLKALVRQQLPEKYKEIFFDQSKNGYAGYIDGGASQEEFYKFIKPILEKMDGTEELLAKLNREDLLRKQRTFDNGSIPHQIHLGELHAILRRQEDFYPFLKDNREKIEKILTFRIPYYVGPLARGNSRFAWMTRKSEETITPWNFEEVVDKGASAQSFIERMTNFDKNLPNEKVLPKHSLLYEYFTVYNELTKVKYVTEGMRKPAFLSGEQKKAIVDLLFKTNRKVTVKQLKEDYFKKIECFDSVEISGVEDRFNASLGTYHDLLKIIKDKDFLDNEENEDILEDIVLTLTLFEDKEMIEERLKTYAHLFDDKVMKQLKRRHYTGWGRLSRKLINGIRDKQSGKTILDFLKSDGFANRNFIQLIHDDSLTFKEAIQKAQVSGQGHSLHEQIANLAGSPAIKKGILQSVKVVDELVKVMGHKPENIVIEMARENQTTQKGQKNSRERMKRIEEGIKELGSQILKEHPVENTQLQNEKLYLYYLQNGRDMYVDQELD

SEQ ID NO: 617 - protein, 213 aa, Streptococcus dysgalactiae subsp. equisimilis SK1249
MDKKYSIGLDIGTNSVGWAVITDDYKVPSKKFKVLGNTDRHSIKKNLIGALLFDSGETAEATRLKRTARRRYTRRKNRIRYLQEIFSSEMSKVDDSFFHRLEESFLVEEDKKHERHPIFGNIVDEVAYHEKYPTIYHLRKKLADSTDKADLRLIYLALAHMIKFRGHFLIEGDLNPDNSDVDKLFIQLVQTYNQLFEEKPINASGVDAKAILS

SEQ ID NO: 618 - protein, 1345 aa, Streptococcus mutans U138; identical to SEQ ID NO: 578

SEQ ID NO: 619 - protein, 1345 aa, Streptococcus mutans SM1
MKKPYSIGLDIGTNSVGWAVVTDDYKVPAKKMKVLGNTDKSHIKKNLLGALLFDSGNTAEDRRLKRTARRRYTRRRNRILYLQEIFSEEMGKVDDSFFHRLEDSFLVTEDKRGERHPIFGNLEEEVKYHENFPTIYHLRQYLADNPEKVDLRLVYLALAHIIKFRGHFLIEGKFDTRNNDVQKLFQEFLAVYDNTFENSSLQEQNVQVEEILTDKISKSAKKDRVLKLFPNEKSNGRFAEFLKLIVGNQADFKKHFELEEKAPLQLSKDTYEEELEVLLAQIGDNYAELFLSAKKLYDSILLSGILTVTDVSTKAPLSASMIQRYNEHQMDLAQLKQFIRQKLSDKYNEVFSDVSKDGYAGYIDGKTNQEAFYKYLKGLLNKIEGSGYFLDKIEREDFLRKQRTFDNGSIPHQIHLQEMRAIIRRQAEFYPFLADNQDRIEKILTFRIPYYVGPLARGKSDFAWLSRKSADKITPWNFDEIVDKESSVEAFINRMTNYDLYLPNQKVLPKHSLLYEKFTVYNELTKVKYKTEQGKTAFFDANMKQEIFDGVFKVYRKVTKDKLMDFLEKEFDEFRIVDLTGLDKENKAFNASYGTYHDLRKILDKDFLDNSKNEKILEDIVLTLTLFEDREMIRKRLENYSDLLTKEQVKKLERRHYTGWGRLSAELIHGIRNKESRKTLLDYLIDDGNSNRNFMQLINDDALSFKEEIAKAQVIGETDNLNQVVSDIAGSPAIKKGILQSLKIVDELVKIMGHQPENIVVEMARENQFTNQGRRNSQQRLKGLTDSIKEFGSQILKEHPVENSQLQNDRLFLYYLQNGRDMYTGEELDIDYLSQYDIDHIIPQAFIKDNSIDNRVLTSSKENRGKSDDVPSKDVVRKMKSYWSKLLSAKLITQRKFDNLTKAERGGLTDDDKAGFIKRQLVETRQITKHVARILDERFNTETDENNKKIRQVKIVTLKSNLVSNFRKEFELYKVREINDYHHAHDAYLNAVIGKALLGVYPQLEPEFVYGDYPHFHGHKENKATAKKFFYSNIMNFFKKDDVRTDKNGEIIWKKDEYISNIKKVLSYPQVNIVKKVEEQTGGFSKESILPKGNSDKLIPRKTKKFYWDTKKYGGFDSPIVAYSILVIADIEKGKSKKLKTVKALVGVTIMEKMTFERDPIAFLERKGYRNVQEENIIKLPKYSLFKLENGRKRLLASARELQKGNEIVLPNHLGTLLYHAKNIHKVDEPKHLDYVDKHKDEFKELLDVVSNFSKKYTLAEGNLEKIKELYAQNNGEDLKELASSFINLLTFTAIGAPATFKFFDKNIDRKRYTSTTEILNATLIHQSITGLYETRIDLSKLGGD

SEQ ID NO: 620 - protein, 1350 aa, Streptococcus mutans ST6
MKKPYSIGLDIGTNSVGWAVVTDDYKVPAKKMKVLGNTDKSHIEKNLLGALLFDSGNTAEDRRLKRTARRRYTRRRNRILYLQEIFSEEMGKVDDSFFHRLEDSFLVTEDKRGERHPIFGNLEEEVKYHENFPTIYHLRQYLADNPEKVDLRLVYLALAHIIKFRGHFLIEGKFDTRNNDVQRLFQEFLAVYDNTFENSSLQEQNVQVEEILTDKISKSAKKDRVLKLFPNEKSNGRFAEFLKLIVGNQADFKKHFELEEKAPLQFSKDTYEEELEVLLAQIGDNYAELFLSAKKLYDSILLSGILTVTDVSTKAPLSASMIQRYNEHQMDLTQLKQFIRQKLSDKYNEVFSDVSKDGYAGYIDGKTNQEAFYKYLKGLLNKIEGSGYFLDKIEREDFLRKQRTFDNGSIPHQIHLQEMRAIIRRQAEFYSFLADNQDRIEKILTFRIPYYVGPLARGKSDFAWLSRKSADKITPWNFDEIVDKESSAEAFINRMTNYDLYLPNQKVLPKHSLLYEKFTVYNELTKVKYKTEQGKTAFFDANMKQEIFDGVFKVYRKVTKDKLMDFLEKEFDEFRIVDLTGLDKENKAFNASYGTYHDLRKILDKDFLDNSKNEKILEDIVLTLTLFEDREMIRKRLENYSDLLTKEQVKKLERRHYTGWGRLSAELIHGIRNKESRKTILDYLIDDGNSNRNFMQLINDDALSFKEEIAKAQVIGETDNLNQVVSDIAGSPAIKKGILQSLKIVDELVKIMGHQPENIVVEMARENQFTNQGRRNSQQRLKGLTDSIKEFGSQILKEHPVENSQLQNDRLFLYYLQNGRDMYTGEELDIDYLSQYDIDHIIPQAFIKDNSIDNRVLTSSKENRGKSDDVPSEDVVNRMRPFWNKLLSSGLISQRKYNNLTKKELTLDDKAGFIKRQLVETRQITKHVARMLDERFNKEFDDNNKRIRKVKIVTLKSNLVSSFRKEFELYKVREINDYHHAHDAYLNAVVVKALLVKYSKLEPEFVYGEYPKYNSYRERKTATQKMFFYSNIMNMFKSKVKLADDQIVERPMIEVNDETGEIAWDKTKHITTVKKVLSYPQVNIVKKVEEQTIGQNGGLFDDNPKSPLEVIPSKLVPLKKALNPEKYGGYQKPTTAYPILLIVDTKQLIPISVMDKKRFEQNPVKFLKDKGYQQIEKNNFVKLPKYTLVDIGNGIKRLWASSKEVHKGNQLVVSKKSQDLLYHAHHLDNDYSNEYVKNHYQQFDILFNEITSFSKKCKLGKEHIQKIEEAYSKERDSASIEELADGFIKLLGFTQLGATSPFSFLGIKLNQKQYTGKKDYLLPCMEATLIHQSITGLYETRIDLSKLGGD

SEQ ID NO: 621 - protein, 1345 aa, Streptococcus mutans 11SSST2
MKKPYSIGLDIGTNSVGWAVVTDDYKVPAKKMKVLGNTDKSHIKKNLLGALLFDSGNTAADRRLKRTARRRYTRRRNRILYLQEIFAEEMSKVDDSFFHRLEDSFLVTEDKRGERHPIFGNLEEEVKYHENFPTIYHLRQYLADNPEKVDLRLVYLALAHIIKFRGHFLIEGKFDTRNNDVQRLFQEFLAVYDNTFENSSLQEQNVQVEEILTDKISKSAKKDRVLKLFPNEKSNGRFAEFLKLIVGNQADFKKHFELEEKAPLQFSKDTYEEELEVLLTQIGDNYAELFLSAKKLYDSILLSGILTVTDVSTKAPLSASMIQRYNEHQMDLAQLKQFIRQKLSDKYNEVFSDVSKDGYAGYIDGKTNQEAFYKYLKGLLNKIEGSGYFLDKIEREDFLRKQRTFDNGSIPHQIHLQEMRAIIRRQAEFYPFLADNQDRIEKILTFRIPYYVGPLARGKSDFAWLSRKSADKITPWNFDEIVDKESSAEAFINRMTNYDLYLPNQKVLPKHSLLYEKFTVYNELTKVKYKTEQGKTAFFDANMKQEIFDGVFKVYRKVTKDKLMDFLEKEFDEFRIVDLTGLDKENKAFNASYGTYHDLRKILDKDFLDNSKNEKILEDIVLTLTLFEDREMIRKRLENYSDLLTKEQVKKLERRHYTGWGRLSAELIHGIRNKESRKTLLDYLIDDGNSNRNFMQLINDDALSFKEEIAKAQVIGETDNLNQVVSDIAGSPAIKKGILQSLKIVDELVKIMGHQPENIVVEMARENQFTNQGRRNSQQRLKGLTDSIKEFGSQILKEHPVENSQLQNDRLFLYYLQNGRDMYTGEELDIDYLSQYDIDHIIPQAFIKDNSIDNRVLTSSKENRGKSDDVPSKDVVRKMKPYWSKLLSAKLITQRKFDNLTKAERGGLTDDDKAGFIKRQLVETRQITKHVARILDERFNTETDENNKKIRQVKIVTLKSNLVSNFRKEFELYKVREINDYHHAHDAYLNAVIGKALLGVYPQLEPEFVYGDYPHFHGHEENKATAKKFFYSNIMNFFKKDDVRTDKNGEIIWKKDEHISNIKKVLSYPQVNIVKKVEEQTGGFSKESILPKGNSDKLIPRKTKKFYWDTKKYGGFDSPIVAYSILVIADIEKGKSKKLKTVKALVGVTIMEKMTFERDPVAFLERKGYRNVQEENIIKLPKYSLFKLENGRKRLLASARELQKGNEIVLPNHLGTLLYHAKNIHKVDEPKHLDYVDKHKDEFKELLDVVSNFSKKYTLAEGNLEKIKELYAQNNGEDLKELSSSFINLLTFTAIGAPAAFKFFDKNIDRKRYTSTTEILNATLIHQSITGLYETRIDLSKLGGD

SEQ ID NO: 622 - protein, 1381 aa, Streptococcus suis ST1
MVKKKYAIGIDIGTNSVGWSIVTDDYKVPSKKMKVFGNTEKRYIKKNLLGTLLFDEGNTAENRRLKRTARRRYTRRRNRILYLQEIFAEEINKIDDSFFQRLDDSFLIVEDKQGSKHPIFGTLQEEKEYHKQFPTIYHLRKQLADSSQKADIRLIYLALAHIIKYRGHFLFEGDLKSENKDVQHLFNDFVEMFDKTVEGSYLSENLPNVADVLVEKVSKSRRLENILHYFPNEKKNGLFGNFLALALGLQPNFKTNFELAEDAKIQFSKETYEEDLEELLGKIGDDYADLFIATKSLYDGILLAGILSTTDSTTKAPLSSSMVNRYEEHQKDLALLKNFIHQNLSDSYKEVFNDKLKDGYAGYIEGKTTQENFYRFIKKAIEKIEGSNYFIDKIDREDFLRKQRTFDNGSIPHQIHLQEMHAIIRRQAEFYPFLVENQDKIEKILTFRIPYYVGPLARGKSEFAWLNRKSDEKIRPWNFDEMVDKETSAENFITRMTNYDRYLPDQKVLPKHSLLYEKFAVYNELTKVKFIAEGMRDYQFLDSGQKKDIVKTLFKTKRKVTAKDIKAYLENSNGYAGVELKGLEEQFNASLPTYHDLLKILRDKAFIDAEENQEILEDIVLTLTLFEDREMIRKRLEKYKDILTEEQRKKLERRHYTGWGRLSAKLINGILDKVTRKTILGYLIDDGTSNRNFMQLINDDTLSFVDEIRLAQGSGEAEDYRAEVQNLAGSPAIKKGILQSLKIVDELIEVMGYEPEHIVVEMARENQFTNQGRRNSQQRINRLENALKDFGSKILEEQKPYGVSKVNNIHLQSDRLFLYYLQNGKDMYTDEELDIDHLSEYDIDHIIPQAFIKDDSLDNKVLTKSAKNRGKSDDVPSMEIVHNRKNFWRQLLKSKLISQRKFDNLTKAERGGLTNEDKARFIQRQLVETRQITKHVARMLDTRFNTKLDEAGNRIRDPKVNIITLKSNLVSQFRKDYQLYKIREINNYHHAHDAYINAVVATALLKKYPQLAPEFVYGEYPTYNSYNSRKSATEKVLFYSNIMNFFKRIVVHSKTGEVRIRPVIEVNKETGEIVWDKKSDFRTVRKVLSYPQVNVVKKTEVQNHGLDRGKPKGFYNANLSPRPKEGSVENLVPAKQSFDTKRYGGYAGISNSYAVLVNGIIEKGKKKSKAEVTEFQGISILARKDFDKNPKQYLLNLGYKDIKSIIKLPKYSLFELENGSRRMLASILSTNNKRGEIHKGNEMYLPDKFVTLLYHAMRVNRTLEPGHKKYVETHRHVFDELLIYILEYNEKIVGAKANGKRIVEAYSARKDTDNLEELCNSFINLLNLTALGSAVDFEFLGTKIPRYRDYTPSSLLKATLIHQSVTGLYETRIDLSKLGGD

SEQ ID NO: 623 - protein, 1345 aa, Streptococcus mutans G123; identical to SEQ ID NO: 600

SEQ ID NO: 624 - protein, 1345 aa, Streptococcus mutans NV1996; identical to SEQ ID NO: 609

SEQ ID NO: 625 - protein, 1345 aa, Streptococcus mutans AC4446; identical to SEQ ID NO: 600

SEQ ID NO: 626 - protein, 1368 aa, Streptococcus iniae 9117
MRKPYSIGLDIGTNSVGWAVITDDYKVPSKKMRIQGTTDRTSIKKNLIGALLFDNGETAEATRLKRTTRRRYTRRKYRIKELQKIFSSEMNELDIAFFPRLSESFLVSDDKEFENHPIFGNLKDEITYHNDYPTIYHLRQTLADSDQKADLRLIYLALAHIIKFRGHFLIEGNLDSENTDVHVLFLNLVNIYNNLFEEDIVETASIDAEKILTSKTSKSRRLENLIAEIPNQKRNMLFGNLVSLALGLTPNFKTNFELLEDAKLQISKDSYEEDLDNLLAQIGDQYADLFIAAKKLSDAILLSDIITVKGASTKAPLSASMVQRYEEHQQDLALLKNLVKKQIPEKYKEIFDNKEKNGYAGYIDGKTSQEEFYKYIKPILLKLDGTEKLISKLEREDFLRKQRTFDNGSIPHQIHLNELKAIIRRQEKFYPFLKENQKKIEKLFTFKIPYYVGPLANGQSSFAWLKRQSNESITPWNFEEVVDQEASARAFIERMTNFDTYLPEEKVLPKHSPLYEMFMVYNELTKVKYQTEGMKRPVFLSSEDKEEIVNLLFKKERKVTVKQLKEEYFSKMKCFHTVTILGVEDRFNASLGTYHDLLKIFKDKAFLDDEANQDILEEIVWTLTLFEDQAMIERRLVKYADVFEKSVLKKLKKRHYTGWGRLSQKLINGIKDKQTGKTILGFLKDDGVANRNFMQLINDSSLDFAKIIKNEQEKTIKNESLEETIANLAGSPAIKKGILQSIKIVDEIVKIMGQNPDNIVIEMARENQSTMQGIKNSRQRLRKLEEVHKNTGSKILKEYNVSNTQLQSDRLYLYLLQDGKDMYTGKELDYDNLSQYDIDHIIPQSFIKDNSIDNTVLTTQASNRGKSDNVPNIETVNKMKSFWYKQLKSGAISQRKFDHLTKAERGALSDFDKAGFIKRQLVETRQITKHVAQILDSRFNSNLTEDSKSNRNVKIITLKSKMVSDFRKDFGFYKLREVNDYHHAQDAYLNAVVGTALLKKYPKLEAEFVYGDYKHYDLAKLMIQPDSSLGKATTRMFFYSNLMNFFKKEIKLADDTIFTRPQIEVNTETGEIVWDKVKDMQTIRKVMSYPQVNIVMKTEVQTGGFSKESIWPKGDSDKLIARKKSWDPKKYGGFDSPIIAYSVLVVAKIAKGKTQKLKTIKELVGIKIMEQDEFEKDPIAFLEKKGYQDIQTSSIIKLPKYSLFELENGRKRLLASAKELQKGNELALPNKYVKFLYLASHYTKFTGKEEDREKKRSYVESHLYYFDEIMQIIVEYSNRYILADSNLIKIQNLYKEKDNFSIEEQAINMLNLFTFTDLGAPSAFKFFNGDIDRKRYSSTNEIINSTLIYQSPTGLYETRIDLSKLGGK

SEQ ID NO: 627 - protein, 1345 aa, Streptococcus constellatus subsp. constellatus SK53
MGKPYSIGLDIGTNSVGWAVVTDDYKVPAKKMKVLGNTDKQSIKKNLLGALLFDSGETAEATRLKRTARRRYTRRKNRLRYLQEIFTGEMNKVDENFFQRLDDSFLVDEDKRGEHHPIFGNIAAEVKYHDDFPTIYHLRRHLADTSKKADLRLVYLALAHMIKFRGHFLYEGDLKAENTDVQALFKDFVEEYDKTIEESHLSEITVDALSILTEKVSKSSRLENLIAHYPTEKKNTLFGNLIALSLDLHPNFKTNFQLSEDAKLQFSKDTYEEDLEGFLGEVGDEYADLFASAKNLYDAILLSGILTVDDNSTKAPLSASMVKRYEEHQKDLKKLKDFIKVNAPDQYNAIFKDKNKKGYASYIESGVKQDEFYKYLKGILLKINGSGDFLDKIDREDFLRKQRTFDNGSIPHQIHLQEMHAILRRQGEHYPFLKENQDKIEKILTFRIPYYVGPLARKGSRFAWAEYKADEKITPWNFDDILDKEKSAEKFITRMTLNDLYLPEEKVLPKHSPLYEAFTVYNELTKVKYVNEQGEAKFFDTNMKQEIFDHVFKENRKVTKDKLLNYLNKEFEEFRIVNLTGLDKENKAFNSSLGTYHDLRKILDKSFLDDKANEKTIEDIIQTLTLFEDREMIRQRLQKYSDIFTKAQLKKLERRHYTGWGRLSYKLINGIRNKENKKTILDYLIDDGYANRNFMQLINDDALSFKEEIARAQIIDDVDDIANVVHDLPGSPAIKKGILQSVKIVDELVKVMGHNPANIIIEMARENQTTDKGRRNSQQRLKLLQDSLKNLDNPVNIKNVENQQLQNDRLFLYYIQNGKDMYTGETLDINNLSQYDIDHIIPQAFIKDNSLDNRVLTRSDKNRGKSDDVPSIEVVHEMKSFWSKLLSVKLITQRKFDNLTKAERGGLTEEDKAGFIKRQLVETRQITKHVAQILDERFNTEFDGNKRRIRNVKIITLKSNLVSNFRKEFELYKVREINDYHHAHDAYLNAVVGNALLLKYPQLEPEFVYGEYPKYNSYRSRKSATEKFLFYSNILRFFKKEDIQTNEDGEIAWNKEKHIKILRKVLSYPQVNIVKKTEEQTGGFSKESILPKGESDKLIPRKTKNSYWDPKKYGGFDSPVVAYSILVFADVEKGKSKKLRKVQDMVGITIMEKKRFEKNPVDFLEQRGYRNVRLEKIIKLPKYSLFELENKRRRLLASAKELQKGNELVIPQRFTTLLYHSYRIEKDYEPEHREYVEKHKDEFKELLEYISVFSRKYVLADNNLTKIEMLFSKNKDAEVSSLAKSFISLLTFTAFGAPAAFNFFGENIDRKRYTSVTECLNATLIHQSITGLYETRIDLSKLGED

SEQ ID NO: 628 - protein, 1370 aa, Streptococcus agalactiae CF01173; identical to SEQ ID NO: 575

SEQ ID NO: 629 - protein, 1345 aa, Streptococcus mutans W6; identical to SEQ ID NO: 600

SEQ ID NO: 630 - protein, 1345 aa, Streptococcus mutans GS-5; identical to SEQ ID NO: 612

SEQ ID NO: 631 - protein, 1388 aa, Streptococcus thermophilus MN-ZLW-002
MTKPYSIGLDIGTNSVGWAVITDNYKVPSKKMKVLGNTSKKYIKKNLLGVLLFDSGITAEGRRLKRTARRRYTRRRNRILYLQEIFSTEMATLDDAFFQRLDDSFLVPDDKRDSKYPIFGNLVEEKAYHDEFPTIYHLRKYLADSTKKADLRLVYLALAHMIKYRGHFLIEGEFNSKNNDIQKNFQDFLDTYNAIFESDLSLENSKQLEEIVKDKISKLEKKDRILKLFPGEKNSGIFSEFLKLIVGNQADFRKCFNLDEKASLHFSKESYDEDLETLLGYIGDDYSDVFLKAKKLYDAILLSGFLTVTDNETEAPLSSAMIKRYNEHKEDLALLKEYIRNISLKTYNEVFKDDTKNGYAGYIDGKTNQEDFYVYLKNLLAEFEGADYFLEKIDREDFLRKQRTFDNGSIPYQIHLQEMRAILDKQAKFYPFLAKNKERIEKILTFRIPYYVGPLARGNSDFAWSIRKRNEKITPWNFEDVIDKESSAEAFINRMTSFDLYLPEEKVLPKHSLLYETFNVYNELTKVRFIAESMRDYQFLDSKQKKDIVRLYFKDKRKVTDKDIIEYLHAIYGYDGIELKGIEKQFNSSLSTYHDLLNIINDKEFLDDSSNEAIIEEIIHTLTIFEDREMIKQRLSKFENIFDKSVLKKLSRRHYTGWGKLSAKLINGIRDEKSGNTILDYLIDDGISNRNFMQLIHDDALSFKKKIQKAQIIGDEDKGNIKEVVKSLPGSPAIKKGILQSIKIVDELVKVMGGRKPESIVVEMARENQYTNQGKSNSQQRLKRLEKSLKELGSKILKENIPAKLSKIDNNALQNDRLYLYYLQNGKDMYTGDDLDIDRLSNYDIDHIIPQAFLKDNSIDNKVLVSSASNRGKSDDFPSLEVVKKRKTFWYQLLKSKLISQRKFDNLTKAERGGLLPEDKAGFIQRQLVETRQITKHVARLLDEKFNNKKDENNRAVRTVKIITLKSTLVSQFRKDFELYKVREINDFHHAHDAYLNAVIASALLKKYPKLEPEFVYGDYPKYNSFRERKSATEKVYFYSNIMNIFKKSISLADGRVIERPLIEVNEETGESVWNKESDLATVRRVLSYPQVNVVKKVEEQNHGLDRGKPKGLFNANLSSKPKPNSNENLVGAKEYLDPKKYGGYAGISNSFAVLVKGTIEKGAKKKITNVLEFQGISILDRINYRKDKLNFLLEKGYKDIELIIELPKYSLFELSDGSRRMLASILSTNNKRGEIHKGNQIFLSQKFVKLLYHAKRISNTINENHRKYVENHKKEFEELFYYILEFNENYVGAKKNGKLLNSAFQSWQNHSIDELCSSFIGPTGSERKGLFELTSRGSAADFEFLGVKIPRYRDYTPSSLLKDATLIHQSVTGLYETRIDLAKLGEG

SEQ ID NO: 632 - protein, 1370 aa, Streptococcus sanguinis SK353
MKKPYSIGLDIGTNSVGWAVVTDDYKVPAKKMRVFGDTDRSHIKKNLLGTLLFDDGNTAESRRLKRTARRRYTRRRNRILYLQEIFTESMNEIDESFFHRLDDSFLVPEDKRGSKYPIFATLQEEKEYHKQFPTIYHLRKQLADSKEKSDVRLIYLALAHMIKYRGHFLYEETFDIKNNDIQKIFNEFINIYDNTFEGSSLSGQNAQVEAIFTDKISKSAKRERVLKLFPDEKSTGLFSEFLKLIVGNQADFKKHFDLEEKAPLQFSKDTYDEELENLLGQIGDDFADLFLIAKKLYDAILLSGILTVTDPSTKAPLSASMIERYENHQKDLAALKQFIKNNLPEKYVEVFSDQSKDGYAGYIDGKTTQEAFYKYIKNLLSKFEGADYFLDKIEREDFLRKQRTFDNGSIPHQIHLQEMNAILRRQGEHYPFLKENREKIEKILTFRIPYYVGPLARDNRDFSWLTRNSDEPIRPWNFEEVVDKARSAEDFIHRMTNYDLYLPEEKVLPKHSLLYETFAVYNELTKVKFIAEGLRDYQFLDSGQKKQIVNQLFKEKRKVTEKDIIHYLHNVDGYDGIELKGIEKQFNANLSTYHDLLKITKDKEFMDDPKNEEILENIVHTLTIFEDREMIKQRLAQYDTLFDEKVIKALTRRHYTGWGKLSAKLINGIRDKQSGKTILDYLIDDDKINRNFMQLINDDGLSFKEIIQKAQVVGKTDDVKQVVQELPGSPAIKKGILQSIKIVDELVKVMGYALESIVIEMARENQTTARGKKNSQQRYKRIEDALKNLAPGLDSNILKENPTDNIQLKNDRLFLYYLQNGKDMYTGKPLDINQLSSYDIDHIIPQAFIKDDSIDNRVLTSSKDNRGKSDNVPSLEVVQKRKAFWQQLLDSKLISERKFNNLTKAERGGLDERDKVGFIRRQLVETQQITKNVAQILDARFNTEVKEKNQKIRTVKIITLKSNLVSNFRKEFGLYKVREINNYHHAHDAYLNAVVAKAILKKYPKLEPEFVYGDYQKYDLKKYISRFKPSKEIEKATEKYFFYSNLLNFFKEEVLYADGTIRKRENIEYSKDTGEIAWDKEKDFATIKKVLSYPQVNIVKKREVQTGGFSKESILPKGNSDKLIPRKTKDILWDTTKYGGFDSPVIAYSILLIADIEKGKAKKLKTVKTLVGITIMEKAAFEENPITFLENKGYHNVRKENILCLPKYSLFELENGRRRLLASAKELQKGNEIVLPVCLTTLLYHSKNLHKLDEPEHLEYIQKHRNEFKDLLNLVSEFSQKYILAEANLEKIKDLYADNEQADIEILANSFINLLTFTALGAPAAFKFFGKDVDRKRYTTVSEILNATLIHQSITGLYETRIDLSKLGEE

SEQ ID NO: 633 - protein, 1155 aa, Streptococcus dysgalactiae subsp. equisimilis SK1250
MDKKYSIGLDIGTNSVGWAVITDDYKVPSKKFKVLGNTDRHSIKKNLIGALLFDSGETAEATRLKRSARRRYTRRKNRIRYLQEIFSSEMSKVDDSFFHRLEESFLVEEDKKHERHPIFGNIVDEVAYHEKYPTIYHLRKKLADSTDKADLRLIYLALAHMIKFRGHFLIEGDLNPDNSDMDKLFIQLVQTYNQLFEENPINASRVDAKAILSARLSKSRRLENLIAQLPGEKRNGLFGNLIALSLGLTPNFKSNFDLAEDAKLQLSKDTYDDDLDNLLAQIGDQYADLFLAAKNLSDAILLSDILRVNSEITKAPLSASMIKRYDEHHQDLTLLKALVRQQLPEKYKEIFFDQSKNGYAGYIDGGASQEEFYKFIKPILEKMDGTEELLAKLNREDLLRKQRTFDNGSIPHQIHLGELHAILRRQEDFYPFLKDNREKIEKILTFRIPYYVGPLARGNSRFAWMTRKSEETITPWNFEEVVDKGASAQSFIERMTNFDKNLPNEKVLPKHSLLYEYFTVYNELTKVKYVTEGMRKPEFLSGKQKEAIVDLLFKTNRKVTVKQLKEDYFKKIECFDSVEISGVEDRFNASLGTYHDLLKIIKDKDFLDNEENEDILEDIVLTLTLFEDKEMIEERLKTYAHLFDDKVMKQLKRRHYTGWGRLSRKLINGIRDKQSGKTILDFLKSDGFANRNFIQLIHDDSLTFKEAIQKAQVSGQGHSLHEQIANLAGSPAIKKGILQSVKVVDELVKVMGHKPENIVIEMARENQTTQKGQKNSRERMKRIEEGIKELGSQILKEHPVENTQLQNEKLYLYYLQNRRDMYVDQELDINRLSDYDVDHIVPQSFIKDDSIDNKVLTRSDKNRGKSDDVPSEEVVKKMKNYWRQLLNAKLITQRKFDNLTKAERGGLSELDKAGFIKRQLVETRQITKHVAQILDSRMNTKYDENDKLIREVKVITLKSKLVSDFRKDFQFYKVREINNYHHAHDAYLNAVVGTALIKKYPKLESEFVYGDYKVYDVRKMIAKSEQEIGKATAKRFFYSNIMNFFKTEITLANGEIRKRPLIETNEETGEIVWDKGRDFATVRKVLSMPQVNIVKKTEVQTGALTNESIYARGSFDKLISRKHRFESSKYGGFGSPTVTYSVLVVAKYQSYKMEK

SEQ ID NO: 634 - protein, 153 aa, Streptococcus dysgalactiae subsp. equisimilis SK1250
MANNNSRGDLQKANEMFLPAKLVTLLYHAHKIESSKELEHEAYILDHYNDLYQLLSYIERFASLYVDVEKNISKVKELFSNIESYSISEICSSVINLLTLTASGAPADFKFLGTTIPRKRYGSPQSILSSTLIHQSITGLYETRIDLSQLGGD

SEQ ID NO: 635 - protein, 1345 aa, Streptococcus mutans B; identical to SEQ ID NO: 600

SEQ ID NO: 636 - protein, 1370 aa, Streptococcus agalactiae SA20-06
MNKPYSIGLDIGTNSVGWSIITDDYKVPAKKMRVLGNTDKEYIKKNLIGALLFDGGNTAADRRLKRTARRRYTRRRNRILYLQEIFAEEMSKVDDSFFHRLEDSFLVEEDKRGSKYPIFATMQEEKDYHEKFPTIYHLRKELADKKEKADLRLVYLALAHIIKFRGHFLIEDDRFDVRNTDIQKQYQAFLEIFDTSFENNHLLSQNVDVEAILTDKISKSAKKDRILAQYPNQKSTGIFAEFLKLIVGNQADFKKHFNLEDKTPLQFAKDSYDEDLENLLGQIGDEFADLFSAAKKLYDSVLLSGILTVTDLSTKAPLSASMIQRYDEHREDLKQLKQFVKASLPEKYQEIFADSSKDGYAGYIEGKTNQEAFYKYLSKLLTKQEDSEYFLEKIKNEDFLRKQRTFDNGSIPHQVHLTELKAIIRRQSEYYPFLKENQDKIEKILTFRIPYYVGPLARGNSDFAWMTRKTDDSIRPWNFEDLVDKEKSAEAFIHRMTNNDLYLPEEKVLPKHSLIYEKFTVYNELTKVRYKNEQGETYFFDSNVKQEIFDGVFKEHRKVSKKQLLDFLAKEFEEFRIVDVTGLDKENKAFNASLGTYHDLKKILDKDFLDNPDNESILEDIVQTITLFEDREMIKKRLENYKDLFTESQLKKLYRRHYTGWGRLSAKLINGIRDRESQKTILDYLISDGRANRNFMQLINDDGLSFKSIISKAQSGSHSDNLKEVVGELAGSPAIKKGILQSLKIVDELVKVMGYEPEQIVVEMARENQTTNQGRRNSRQRYKLLEDGVKNLASDLNGDILKEYPTDNQALQNERLFLYYLQNGRDMYTGEALDIDNLSQYDIDHIVPQAFIKDDSIDNRVLVSSAKNRGKSDDVPSIDIVKARKAFWKKLLDAKLISQRKYDNLTKAERGGLTPDDKAGFIQRQLVETRQITKHVARILDERFNNKVDDNNKPIRKVKIVTLKSNLVSNFRKEFGFYKIREVNNYHHAHDAYLNAVVAKAILTKYPQLEPEFVYGDYPKYNSYKTRKSATEKLFFYSNIMNFFKTKVTLADETVVVKDDIEVNNETGEIAWDKKKHFATVRKVLSYPQVNIVKKTEVQTGGFSKESILAHSNSDKLIPRKTKDIYLDPKKYGGFDSPIVAYSVLVLADIKKGKAQKLKTVKELIGITIMERERFEKNPSAFLESKGYLNIRTDKLIILPKYSLFELENGRRRLLASAGELQKGNELALPTQYMKFLYLASRYNESKGKPEEIEKKQEFVNQHVSYFDDILQLINDFSKRVILADANLEKINKLYSDNKDNTPVDELAKNIINLFTFTSLGAPAAFKFFDKSVDRKRYTSTKEVLDSTLIHQSITGLYETRIDLGKLGED

SEQ ID NO: 637 - protein, 1392 aa, Streptococcus mitis SK321
MNNNNYSIGLDIGTNSVGWAVITDDYKVPSKKMKVLGNTDKHFIKKNLIGALLFDEGATAEDRRFKRTARRRYTRRKNRLRYLQEIFSEEMSKVDSSFFHRLDDSFLVPEDKRGSKYPIFATLAEEKEYHKKFPTIYHLRKHLADSKEKTDLRLIYLALAHMIKYRGHFLYEESFDIKNNDIQKIFSEFISIYDNTFEGSSLSGQNAQVEAIFTDKISKSAKRERILKLFAYEKSTDLFSEFLKLIVGNQADFKKHFDLEEKAPLQFSKDTYDEDLENLLGQIGDDFADLFLVAKKLYDAILLSGILTVTDSSTKAPLSASMIERYENHQKDLAALKQFIQNNLQEKYDEVFSDQSKDGYARYINGKTTQEAFYKYIKNLLSKFEGSDYFLDKIEREDFLRKQRTFDNGSIPHQIHLQEMNAIIRRQGEHYPFLKEYKEKIETILTFRIPYYVGPLARGNRNFAWLTRNSDQAIRPWNFEEIVDQASSAEEFINKMTNYDLYLPEEKVLPKHSLLYETFAVYNELTKVKFISEGLRDYQFLDSGQKKQIVNQLFKEKRKVTEKDIIQYLHNVDGYDGIELKGIEKQFNASLSTYHDLLKIIKDKEFMDDPKNEEILENIVHTLTIFEDREMIKQRLAQYASIFDKKVIKALTRRHYTGWGKLSAKLINGICDKKTGKTILDYLIDDGYSNRNFMQLINDDGLSFKDIIQKAQVVGKTNDVKQVVQELPGSPAIKKGILQSIKLVDELVKVMGHAPESIVIEIARENQTTARGKKNSQQRYKRIEDALKNLAPGLDSNILKEHPTDNIQLQNDRLFLYYLQNGKDMYTGEALDINQLSSYDIDHIVPQAFIKDDSLDNRVLTSSKDNRGKSDNVPSLEVVQKRKAFWQQLLDSKLISEHKFNNLTKAERGGLDERDKVGFIRRQLVETRQITKHVAQILDARFNTEVNEKDKKNRTVKIITLKSNLVSNFRKEFKLYKVREINDYHHAHDAYLNAVVAKAILKKYPKLEPGFVYGDYQKYDIKRYISRSKDPKEVEKATEKYFFYSNLLNFFKEEVHYADGTIVKRENIEYSKDTGEIAWNKEKDFATIKKVLSLPQVNIVKKTEIQTHGLDRGKPRGLFNSNPSPKPSEDRKENLVPIKQGLDPRKYGGYAGISNSYAVLVKAIIEKGAKKQQKTVLEFQGISILDKINFEKNKENYLLEKGYIKILSTITLPKYSLFEFPDGTRRRLASILSTNNKRGEIHKGNELVIPEKYTTLLYHAKNINKTLEPEHLEYVEKHRNDFAKLLEYVLNFNDKYVGALKNGERIRQAFIDWETVDIEKLCFSFIGPRNSKNAGLFELTSQGSASDFEFLGVKIPRYRDYTPSSLLNATLIHQSITGLYETRIDLSKLGED

SEQ ID NO: 638 - protein, 1377 aa, Streptococcus sp. C300
MNNKPYSIGLDIGTNSVGWSVITDDYKVPSKKMKVLGNTDKRFIKKNLIGALLFDEGTTAEARRLKRTARRRYTRRKNRLRYLQEIFAEEMSKVDSSFFHRLDDSFLIPEDKRGSKYPIFATLVEEKEYHKQFPTIYHLRKQLADSKEKADLRLIYLVLAHMIKYRGHFLYEEAFDIKNNDIQKIFNEFISIYDNTFEGSSLSGQNAQVETIFTDKISKSAKRERVLKLFPDEKSTGLFSEFLKLIVGNQADFKKHFDLEEKAPLQFSKDTYDEDLENLLEQIGDDFADLFVAAKKLYDAILLSGILTVTDPSTKAPLSASMIERYENHQKDLAVLKQFIKTNLPEKYVEVFSDQSKDGYAGYIDGKTTQEAFYKYIKNLLSKFDGADYFLDKIEREVFLRKQRTFDNGSIPHQIHLQEMNTILRRQGEHYPFLKENKEKIEKILTFRIPYHVGPLARGNRDFAWLTRNSDQAIRPWNFEEIVDKASSAEDFINKMTNYDLYLPEEKVLPKHSLLYETFAVYNELTKVKFIAEGMRDYQFLDSGQKKKIINQLFKKKRKVTEDDIIDCLQKIDNYDGIELKGIEKQFNASLSTYHDILKIIRDKEFMDDPKNGDILENVIHTLTIFEDREMIKQRLAQYNSIFDEKVIKALSRKHYTGWGKLSAKLIDGIRDKQTGKTILDYLMDDGKSNRNFMQLIKDDELSFTEIIQKAQVVGDTDNLRQVVQNLPGSPAIKKGILQSIKIVDELVKVMGHAPESIVIEMARENQTTARGKKNSQQRYKRIEDSLKNLASGLDSNILKENPTDNIQLQNDRLFLYYLQNGKDMYTGEALNINQLSSYDIDHIIPQAFIKDDSLDNRVLTSSKDNRGKSDNVPSLEVVEKMKAFWQQLLDSKLISERKYNNLTKAERERGGLNELDKVGFIKRQLVETRQITKHVAQILDARFNKEVTEKNKKNRNVKIITLKSNMVSNFRKEFGLYKVREINDYHHAHDAYLNAVVAKAILKKYPKLEPEFVYGDYQKYDLKRYISRSKDPKEVEKATEKYFFYSNLLNFFKEEVHYADGTIVKRENIEYSKDTGEIAWNKEKDFATIKKVLSLPQVNIVKKTEEQTVGQNGGLFDNNIVSKKKVVDASKLIPIKSGLSPEKYGGYARPTIAYSVLVTYKQNNKIKNTMVGIPVLTKLEFERDPNLYLRNLGINNVSHVIKLVKYTVLEFKHKYGTYRRFIVSNQELKRANQIFVTTKQMKLISQYTTLDKNEHDSLLKNNQQLIQSIWNQFLEFMLATDLVNKKQYDELILTNNQTIEECRNIMNRVITTLSFTNINAGQKKIIFDDTLSLPIKRWQFTDSDKMVKKIIESTLIHQSITGLYETRIDLSKLGED

SEQ ID NO: 639 - protein, 1345 aa, Streptococcus mutans 14D; identical to SEQ ID NO: 600

SEQ ID NO: 640 - protein, 1345 aa, Streptococcus mutans 5DC8
MKKPYSIGLDIGTNSVGWAVVTDDYKVPAKKMKVLGNTDKSHIKKNLLGALLFDSGNTAEDRRLKRTARRRYTRRRNRILYLQEIFSEEMGKVDDSFFHRLEDSFLVTEDKRGERHPIFGNLEEEVKYHENFPTIYHLRQYLADNPEKTDLRLVYLALAHIIKFRGHFLIEGKFDTRNNDVQRLFQEFLAVYDNTFENSSLQEQNVQVEEILTDKISKSAKKDRVLKLFPNEKSNGRFAEFLKLIVGNQADFKKHFELEEKAPLQFSKDIYEEELEVLLAQIGDNYAELFLSAKKLYDSILLSGILTVTDVSTKAPLSASMIQRYNEHQMDLAQLKQFIRQKLSDKYNEVFSDVSKDGYAGYIDGKTNQEAFYKYLKGLLNKIEGSGYFLDKIEREDFLRKQRTFDNGSIPHQIHLQEMRAIIRRQAEFYPFLADNQDRIEKILTFRIPYYVGPLARGKSDFAWLSRKSADKITPWNFDEIVDKESSAEAFINRMTNYDLYLPNQKVLPKHSLLYEKFTVYNELTKVKYKTEQGKTAFFDANMKQEIFDGVFKVYRKVTKDKLMDFLEKEFDEFRIVDLTGLDKENKAFNASYGTYHDLRKILDKDFLDNSKNEKILEDIVLTLTLFEDREMIRKRLKNYSDLLTKEQLKKLERRHYTGWGRLSAELIHGIRNKESRKTILDYLIDDGNSNRNFMQLINDDALSFKEEIAKAQVIGETDNLNQVVSDIAGSLAIKKGILQSLKIVDELVKIMGHQPENIVVEMARENQFTNQGRRNSQQRLKGLTDSIKEFGSQILKEHPVENSQLQNDRLFLYYLQNGRDMYTGEELDIDYLSQYDIDHIIPQAFIKDNSIDNRVLTSSKENRGKSDDVPSKDVVRKMKSYWSKLLSAKLITQRKFDNLTKGERGGLTDDDKAGFIKHQLVETRQITKHVARILDERFNTETDENNKKIRQVKIVTLKSNLVSNFRKEFELYKVREINDYHHAHDAYLNAVIGKALLGVYPQLEPEFVYGDYPHFHGHKENKATAKKFFYSNIMNFFKKDDVRTDKNGEIIWKKDEYISNIKKVLSYPQVNIVKKVEEQTGGFFKESILPKGDSDKLIPRKTKKFYWDTKKYGGFDSPIVAYSILVIADIEKGKSKKLKTVKALVGVTIMEKMTFERDPVAFLERKGYRNVQEENIIKLPKYSLFKLENGRKRLLASARELQKGNEIVLPNHLGTLLYHAKNIHKVDEPKHLDYVDKHKDEFKELLDVVSNFSKKYTLAEGNLEKIKELYAQNNGEDLKELASSFINLLTFTAIGAPATFKFFDKNIDRKRYTSTTEILNATLIHQSITGLYETRIDLSKLGGD

SEQ ID NO: 641 - protein, 1345 aa, Streptococcus mutans SF1; identical to SEQ ID NO: 609

SEQ ID NO: 642 - protein, 1350 aa, Streptococcus mutans 24; identical to SEQ ID NO: 582

SEQ ID NO: 643 - protein, 1386 aa, Streptococcus anginosus SK1138
MNQKYSIGLDIGTNSVGWAVITDDYKVPAKKMKVLGNTDKQSIKKNLLGALLFDSGETAEATRLKRTARRRYTRRRNRLRYLQEIFAEEMMQVDESFFQRLDDSFLVDEDKRGERHPIFGNIAAEVKYHDEFPTIYHLRKHLADISQKADLRLVYLALAHMIKFRGHFLIEGQLKAENTNVQALFKDFVEVYDKTVEESHLSEITVDALSILTEKVSKSRRLENLIAHYPAEKKNTLFGNLIALFLGLQPNFKTNFQLSEDAKLQFSKDTYEEDLEGLLGEVGDEYADLFASAKNLYDAILLSGILTVDDNSTKAPLSASMVKRYEEHQKDLKKFEDFIKVNALDQYNAIFKDKNKKGYAGYIESGVKQDEFYKYLKGILLQINGSGDFLDKIDREDFLRKQRTFDNGSIPHQIHLQEMHAILRRQGEHYPFLKENQDKIEKILTFRIPYYVGPLARKGSRFAWAEYKADEKITPWNFDDILDKEKSAEKFITRMTLNDLYLPEEKVLPKHSLLYETFTVYNELTKVKYVNEQGEAKFFDANMKQEIFDHVFKENRKVTKDKLLNYLNKEFEEFRIVNLTGLDKENKVFNSSLGTYHDLRKILNKSFLDNKENAQIIEDIIQTLTLFEDREMIRQRLQKYSDIFTKAQLKKLERRHYTGWGRLSYKLINGIRNKENKKTILDYLIDDGYANRNFMQLINDDALSFKEEIAKAQIIGDVDDIANVVHDLPGSPAIKKGILQSVKIVDELVKVMGHNPANIIIEMARENQTTDRGRRNSQQRLKLLQDSLKNLDNPVNIKNVENQQLQNDRLFLYYIQNGKDMYTGETLDINNLSQYDIDHIIPQAYIKDDSFDNRVLTSSSENRGKSDNVPSIEVVCARKADWMRLRKAGLISQRKFDNLTKAERGGLTENDKAGFIKRQLVETRQITKHVAQVLDARFNAKHDENKKVIRDVKIITLKSNLVSQFRKDFKFYKVREINDYHHAHDAYLNAVIGTALLKKYPKLASEFVYGEFKKYDVRKFIAKSDKEIGKATAKYFFYSNLMNFFKKEVKFADGTVVERPDIETSEDGEIAWNKQTDFKIVRKVLSYPQVNIVKKTEVQTHGLDRGKPRGLFNANPSPKPKPDSSENLVGVKRNLDPKKYGGYAGISNSYAVLVKAIIEKGVKKKETMVLEFQGISILDRITFEKDKRAFLLGKGYKDIKKIIELPKYSLFELKDGSRRMLASILSTNNKRGEIHKGNELFVPQKFTTLLYHAKRINNPINKDHIEYVKKHRDDFKELLNYVLEFNEKYVGATKNGERLKEAVADFDSKSNEEICTSFLGAVNSKNAGLFELTSLGSASDFEFLGVKIPRYRDYTPSSLLKDSTLIHQSITGLYETRIDLSKLGED

SEQ ID NO: 644 - protein, 1345 aa, Streptococcus mutans SM6
MKKPYSIGLDIGTNSVGWAVVTDDYKVPAKKMKVLGNTDKSHIKKNLLGALLFDSGNTAEDRRLKRTARRRYTRRRNRILYLQEIFSEEMGKVDDSFFHRLEDSFLVTEDKRGERHPIFGNLEEEVKYHENFPTIYHLRQYLADNPEKTDLRLVYLALAHIIKFGGHFLIEGKFDTRNNDVQRLFQEFLAVYDNTFENSSLQEQNVQVEEILTDKISKSAKKDRVLKLFPNEKSNGRFAEFLKLIVGNQADFKKHFELEEKAPLQFSKDIYEEELEVLLAQIGDNYAELFLSAKKLYDSILLSGILTVTDVSTKAPLSASMIQRYNEHQMDLAQLKQFIRQKLSDKYNEVFSDVSKDGYAGYIDGKTNQEAFYKYLKGLLNKIEGSGYFLDKIEREDFLRKQRTFDNGSIPHQIHLQEMRAIIRRQAEFYPFLADNQDRIEKILTFRIPYYVGPLARGKSDFAWLSRKSADKITPWNFDEIVDKESSVEAFINRMTNYDLYLPNQKVLPKHSLLYEKFTVYNELTKVKYKTEQGKTAFFDANMKQEIFDGVFKVYRKVTKDKLMDFLEKEFDEFRIVDLTGLDKENKAFNASYGTYHDLRKILDKDFLDNSKNEKILEDIVLTLTLFEDREMIRKRLKNYSDLLTKEQLKKLERRHYTGWGRLSAELIHGIRNKESRKTILDYLIDDGNSNRNFMQLINDDALSFKEEIAKAQVIGETDNLNQVVSDIAGSPAIKKGILQSLKIVDELVKIMGHQPENIVVEMARENQFTNQGRRNSQQRLKGLTDSIKEFGSQILKEHPVENSQLQNDRLFLYYLQNGRDMYTGEELDIDYLSQYDIDHIIPQAFIKDNSIDNRVLTSSKENRGKSDDVPSKNVVRKMKSYWSKLLSAKLITQRKFDNLTKAERGGLTDDDKAGFIKRQLVETRQITKHVARILDERFHTETDENNKKIRQVKIVTLKSNLVSNFRKEFELYKVREINDYHHAHDAYLNAVIGKALLGVYPQLEPEFVYGDYPHFHGHKENKATAKKFFYSNIMNFFKKDDVRTDKNGEIIWKKDEHISNIKKVLSYPQVNIVKKVEEQTGGFSKESILPKGNSDKLIPRKTKKFYWDTKKYGGFDSPIVAYSILVIADIEKGKSKKLKTVKALVGVTIMEKMTFERDPVAFLERKGYRNVQEENIIKLPKYSLFKLENGRKRLLASARELQKGNEIVLPNHLGTLLYHAKNIHKVDEPKHLDYVDKHKDEFKELLDVVSNFSKKYTLAEGNLEKIKELYAQNNGEDLKELASSFINLLTFTAIGAPATFKFFDKNIDRKRYTSTTEILNATLIHQSITGLYETRIDLSKLGGD

SEQ ID NO: 645 - protein, 1375 aa, Streptococcus canis FSL Z3-227
MEKKYSIGLDIGTNSVGWAVITDDYKVPSKKFKVLGNTNRKSIKKNLMGALLFDSGETAEATRLKRTARRRYTRRKNRIRYLQEIFANEMAKLDDSFFQRLEESFLVEEDKKNERHPIFGNLADEVAYHRNYPTIYHLRKKLADSPEKADLRLIYLALAHIIKFRGHFLIEGKLNAENSDVAKLFYQLIQTYNQLFEESPLDEIEVDAKGILSARLSKSKRLEKLIAVFPNEKKNGLFGNIIALALGLTPNFKSNFDLTEDAKLQLSKDTYDDDLDELLGQIGDQYADLFSAAKNLSDAILLSDILRSNSEVTKAPLSASMVKRYDEHHQDLALLKTLVRQQFPEKYAEIFKDDTKNGYAGYVGIGIKHRKRTTKLATQEEFYKFIKPILEKMDGAEELLAKLNRDDLLRKQRTFDNGSIPHQIHLKELHAILRRQEEFYPFLKENREKIEKILTFRIPYYVGPLARGNSRFAWLTRKSEEAITPWNFEEVVDKGASAQSFIERMTNFDEQLPNKKVLPKHSLLYEYFTVYNELTKVKYVTERMRKPEFLSGEQKKAIVDLLFKTNRKVTVKQLKEDYFKKIECFDSVEIIGVEDRFNASLGTYHDLLKIIKDKDFLDNEENEDILEDIVLTLTLFEDREMIEERLKTYAHLFDDKVMKQLKRRHYTGWGRLSRKMINGIRDKQSGKTILDFLKSDGFSNRNFMQLIHDDSLTFKEEIEKAQVSGQGDSLHEQIADLAGSPAIKKGILQTVKIVDELVKVMGHKPENIVIEMARENQTTTKGLQQSRERKKRIEEGIKELESQILKENPVENTQLQNEKLYLYYLQNGRDMYVDQELDINRLSDYDVDHIVPQSFIKDDSIDNKVLTRSVENRGKSDNVPSEEVVKKMKNYWRQLLNAKLITQRKFDNLTKAERGGLSEADKAGFIKRQLVETRQITKHVARILDSRMNTKRDKNDKPIREVKVITLKSKLVSDFRKDFQLYKVRDINNYHHAHDAYLNAVVGTALIKKYPKLESEFVYGDYKVYDVRKMIAKSEQEIGKATAKRFFYSNIMNFFKTEVKLANGEIRKRPLIETNGETGEVVWNKEKDFATVRKVLAMPQVNIVKKTEVQTGGFSKESILSKRESAKLIPRKKGWDTRKYGGFGSPTVAYSILVVAKVEKGKAKKLKSVKVLVGITIMEKGSYEKDPIGFLEAKGYKDIKKELIFKLPKYSLFELENGRRRMLASATELQKANELVLPQHLVRLLYYTQNISATTGSNNLGYIEQHREEFKEIFEKIIDFSEKYILKNKVNSNLKSSFDEQFAVSDSILLSNSFVSLLKYTSFGASGGFTFLDLDVKQGRLRYQTVTEVLDATLIYQSITGLYETRTDLSQLGGD

SEQ ID NO: 646 - protein, 1368 aa, Streptococcus pyogenes HKU QMH11M0907901
MDKKYSIGLDIGTNSVGWAVITDDYKVPSKKFKVLGNTDRHSIKKNLIGALLFDSGEIAEATRLKRTARRRYTRRKNRICYLQEIFSNEMAKVDDSFFHRLEESFLVEEDKKHERHPIFGNIVDEVAYHEKYPTIYHLRKKLVDSTDKADLRLIYLALAHMIKFRGHFLIEGDLNPDNSDVDKLFIQLVQTYNQLFEENPINASGVDAKAILSARLSKSRRLENLIAQLPGEKKNGLFGNLIALSLGLTPNFKSNFDLAEDAKLQLSKDTYDDDLDNLLAQIGDQYADLFLAAKNLSDAILLSDILRLNSEITKAPLSASMIKRYDEHHQDLTLLKALVRQQLPEKYKEIFFDQSKNGYAGYIDGGASQEEFYKFIKPILEKMDGTEELLAKLNREDLLRKQRTFDNGSIPHQIHLGELHAILRRQEDFYPFLKDNREKIEKILTFRIPYYVGPLARGNSRFAWMTRKSEETITPWNFEEVVDKGASAQSFIERMTNFDKNLPNEKVLPKHSLLYEYFTVYNELTKVKYVTEGMRKPAFLSGEQKKAIVDLLFKTNRKVTVKQLKEDYFKKIECFDSVEISGVEDRFNASLGTYHDLLKIIKDKDFLDNEENEDILEDIVLTLTLFEDREMIEERLKTYAHLFDDKVMKQLKRRRYTGWGRLSRKLINGIRDKQSGKTILDFLKSDGFANRNFMQLIHDDSLTFKEDIQKAQVSGQGDSLHEHIANLAGSPAIKKGILQTVKVVDELVKVMGRHKPENIVIEMARENQTTQKGQKNSRERMKRIEEGIKELGSQILKEHPVENTQLQNEKLYLYYLQNGRDMYVDQELDINRLSDYDVDHIVPQSFIKDDSIDNKVLTRSDKNRGKSDNVPSEEVVKKMKNYWRQLLNAKLITQRKFDNLTKAERGGLSELDKAGFIKRQLVETRQITKHVAQILDSRMNTKYDENDKLIREVKVITLKSKLVSDFRKDFQFYKVREINNYHHAHDAYLNAVVGTALIKKYPKLESEFVYGDYKVYDVRKMLAKSEQEIGKATAKYFFYSNIMNFFKTEITLANGEIRKRPLIETNGETGEIVWDKGRDFATVRKVLSMPQVNIVKKTEVQTGGFSKESILPKRNSDKLIARKKDWDPKKYGGFDSPTVAYSVLVVAKVEKGKSKKLKSVKELLGITIMERSSFEKNPIDFLEAKGYKEVRKDLIIKLPKYSLFELENGRKRMLASAGELQKGNELALPSKYVNFLYLASHYEKLKGSPEDNEQKQLFVEQHKHYLDEIIEQISEFSKRVILADANLDKVLSAYNKHRDKPIREQAENIIHLFTLTNLGAPTAFKYFDTTIDRKRYTSTKEVLDATFIHQSITGLYETRIDLSQLGGD

SEQ ID NO: 647 - protein, 1370 aa, Streptococcus agalactiae GB00112
MNKPYSIGLDIGTNSVGYSVVTDDYKVPAKKMRVLGNTDKEYIKKNLIGALLFDGGNTASDRRLKRTARRRYTRRRNRILYLQEIFAEEMSKVDDSFFHRLEDSFLVEDDKRGSKYPIFATMQEEKDYHEKFPTIYHLRKELADKKEKADLRLVYLALAHIIKFRGHFLIEDDSFDVRNTDIQRQYQAFLEIFDTTFENNHLLSQNIDVEGILTDKISKSAKKDRILAQYPNQKSTGIFAEFLKLIVGNQADFKKHFNLEDKTPLQFAKDSYDEDLENLLGQIGDEFADLFSVAKKLYDSVLLSGILTVTDLSTKAPLSASMIQRYDEHREDLKQLKQFVKASLPEKYQEIFTDSSKDGYAGYIEGKTNQGAFYKYLSKLLTKQEGSEYFLEKIKNEDFLRKQRTFDNGSIPHQVHLTELKAIIRRQSEYYPFLKENLDRIEKILTFRIPYYVGPLAREKSDFAWMTRKTDDSIRPWNFEELVDKEASAEAFIHRMTNNDLYLPEEKVLPKHSLIYEKFTVYNELTKVRYKNEQGETYFFDSNIKQEIFDGVFKEHRKVSKKKLLDFLAKEYEEFRIVDVIGLDKENKAFNASLGTYHDLKKILDKDFLDNPDNESILEDIVQTLTLFEDREMIKKRLENYKDLFTESQLKKLYRRHYTGWGRLSAKLINGIRDKESQKTILDYLISDGRANRNFMQLIHDDGLSFKPIIDKAQAGSHSDNLKEVVGELAGSPAIKKGILQSLKIVDELVKVMGYEPEQVVVEMARENQTTNQGRRNTRQRYKLLEEGVKNLASDLNGNILKEYPTDNQALQNERLFLYYLQNGRDMYTGEALDIDNLSQYDIDHIVPQAFIKDDSIDNRVLVSSAKNRGKSDNVPSIDIVKARKAFWKKLLDAKLMSQRKYDNLTKAERGGLTSDDKARFIQRQLVETRQITKHVARILDERFNNELDSKGRRIRKVKIVTLKSNLVSNFRKEFGFYKIREVNDYHHAHDAYLNAVVAKAILTKYPQLEPEFVYGDYPKYNSYKTRKSATEKLFFYSNIMNFFKTKVTLADGTVVVKDDIEVNNDTGEIVWDKKKHFATVRKVLSYPQVNIVKKTEIQTGGFSKESILAHGNSDKLIPRKTKDIYLDPKKYGGFDSPIVAYSVLVVADIKKGKAQKLKTVTELLGITIMERFRFEKNPSAFLESKGYLNIRDDKLMILPKYSLFELENGRRRLLASAGELQKGNELALPTQYMKFLYLASRYNELKGKPEEIEQKQEFVVQHVSYFDDILQIINDFSNRVILADANLEKINKLYQDNKENISVDELANNIINLFTFTSLGAPAAFKFFDKIVDRKRYTSTKEVLNSTLIHQSITGLYETRIDLGKLGED

SEQ ID NO: 648 - protein, 1378 aa, Streptococcus agalactiae ATCC 13813
MNKPYSIGLDIGTNSVGWSIITDDYKVPAKKMRVLGNTDKEYIKKNLIGALLFDGGNTAADRRLKRTARRRYTRRRNRILYLQEIFAEEMSKVDDSFFHRLEDSFLVEEDKRGSKYPIFATMQEEKYYHEKFPTIYHLRKELADKKEKADLRLIYLALAHIIKFRGHFLIEDDRFDVRNTDIQKQYQAFLEIFDTTFENNDLLSQNVDVEAILTDKISKSAKKDRILARYPNQKSTGIFAEFLKLIVGNQADFKKHFNLEDKTPLQFAKDSYDEDLENLLGQIGDEFADLFSAAKKLYDSVLLSGILTVIDLSTKAPLSASMIQRYDEHHEDLKHLKQFVKASLPENYREVFADSSKDGYAGYIEGKTSQEAFYKYLLKLLTKQEGSEYLLEKIKNEDFLRKQRTFDNGSIPHQVHLTELRAIIRRQSEYYPFLKENLDRIEKILTFRIPYYVGPLAREKSDFAWMTRKTDDSIRPWNFEDLVDKEKSAEAFIHRMTNNDLYLPEEKVLPKHSLIYEKFTVYNELTKVRFLAEGFKDFQFLNRKQKETIFNSLFKEKRKVTEKDIISFLNKVDGYEGIAIKGIEKQFNASLSTYHDLKKILGKDFLDNTDNELILEDIIQTLTLFEDREMIKKRLDIYKDFFTESQLKKLYRRHYTGWGRLSAKLINGIRNKENQKTILDYLIDDGSANRNFMQLIKDAGLSFKPIIDKARTGSHSDNLKEVVGELAGSPAIKKGILQSLKIVDELVKVMGYEPEQIVVEMARENQTTAKGLSRSRQRLTTLRESLGNLKSNILEEKKPKYVKDQVENHHLSDDRLFLYYLQNGKDMYTDDELDIDNLSQYDIDHIIPQAFIKDDSIDNRVLVSSAKNRGKSDDVPSIEIVKARKMFWKNLLDAKLMSQRKYDNLTKAERGGLTSDDKARFIQRQLVETRQITKHVARILDERFNNELDSKGRRIRKVKIVTLKSNLVSNFRKEFGFYKIREVNNYHHAHDAYLNAVVAKAILTKYPQLEPEFVYGLYRRKKLSKIVREDKEEKYSEATRKMFFYSNLMNMFKRVVRLADGSIVVRPVIETGRYMGKTAWDKKKHFATVRKVLSYPQNNIVKKTEIQTGGFSKESILAHGNSDKLIPRKTKDIYLDPKKYGGFDSPIVAYSVLVVADIKKGKAQKLKTVTELLGITIMERSRFEKNTSAFLESKGYLNIRDDKLMILPKYSLFELENGRRRLLASAGELQKGNELALPTQFMKFLYLASRYNESKGKPEEIEKKQEFVNQHVSYFDDILQLINDFSNRVILADANLEKINKLYQDNKENIPVDELANNIINLFTFTSLGAPAAFKFFDKIVDRKRYTSTKEVLNSTLIHQSITGLYETRIDLGKLGEG

SEQ ID NO: 649 - protein, 1338 aa, Streptococcus mutans NLML4
MDLIGTNSVGWAVVTDDYKVPAKKMKVLGNTDKSHIKKNLLGALLFDSGNTAADRRLKRTARRRYTRRRNRILYLQEIFAEEMSKVDDSFFHRLEDSFLVTEDKRGERHPIFGNLEEEVKYHENFPTIYHLRQYLADNPEKVDLRLVYLALAHIIKFRGHFLIEGKFDTRNNDVQRLFQEFLAVYDNTFENSSLQEQNVQVEEILTDKISKSAKKDRVLKLFPNEKSNGRFAEFLKLIVGNQADFKKHFELEEKAPLQFSKDTYEEELEVLLAQIGDNYAELFLSAKKLYDSILLSGILTVTDVSTKAPLSASMIQRYNEHQMDLAQLKQFIRQKLSDKYNEVFSDVSKDGYAGYIDGKTNQEAFYKYLKGLLNKIEGSGYFLDKIEREDFLRKQRTFDNGSIPHQIHLQEMRAIIRRQAEFYPFLADNQDRIEKILTFRIPYYVGPLARGKSDFAWLSRKSADKITPWNFDEIVDKESSAEAFINRMTNYDLYLPNQKVLPKHSLLYEKFTVYNELTKVKYKTEQGKTAFFDANMKQEIFDGVFKVYRKVTKDKLMDFLEKEFDEFRIVDLTGLDKENKAFNASYGTYHDLRKILDKDFLDNSKNEKILEDIVLTLTLFEDREMIRKRLENYSDLLTKEQVKKLERRHYTGWGRLSAELIHGIRNKESRKTILDYLIDDGNSNRNFMQLINDDALSFKEEIAKAQVIGETDNLNQVVSDIAGSPAIKKGILQSLKIVDELVKIMGHQPENIVVEMARENQFTNQGRRNSQQRLKGLTDSIKEFGSQILKEHPVEHSQLQNDRLFLYYLQNGRDMYTGEELDIDYLSQYDIDHIIPQAFIKDNSIDNRVLTSSKENRGKSDDVPSKNVVRKMKSYWSKLLSAKLITQRKFDNLTKAERGGLTDDDKAGFIKRQLVETRQITKHVARILDERFHTETDENNKKIRQVKIVTLKSNLVSNFRKEFELYKVREINDYHHAHDAYLNAVIGKALLGVYPQLEPEFVYGDYPHFHGHKENKATAKKFFYSNIMNFFKKDDVRTDKNGEIIWKKDEHISNIKKVLSYPQVNIVKKVEEQTGGFSKESILPKGNSDKLIPRKTKKFYWDTKKYGGFDSPIVAYSILVIADIEKGKSKKLKTVKALVGVTIMEKMTFERDPVAFLERKGYRNVQEENIIKLPKYSLFKLENGRKRLLASARELQKGNEIVLPNHLGTLLYHAKNIHKVDEPKHLDYVDKHKDEFKELLDVVSNFSKKYTLAEGNLEKIKELYAQNNGEDLKELASSFINLLTFTAIGAPATFKFFDKNIDRKRYTSTTEILNATLIHQSITGLYETRIDLSKLGGD

SEQ ID NO: 650 - protein, 1345 aa, Streptococcus mutans 1SM1
MKKPYSIGLDIGTNSVGWAVVTDDYKVPAKKMKVLGNTDKSHIKKNLLGALLFDSGNTAEDRRLKRTARRRYTRRRNRILYLQEIFSEEMGKVDDSFFHRLEDSFLVTEDKRGERHPIFGNLEEEVKYHENFPTIYHLRQYLADNPEKVDLRLVYLALAHIIKFRGHFLIEGKFDTRNNDVQRLFQEFLAVYDNTFENSSLQEQNVQVEEILTDKISKSAKKDRVLKLFPNEKSNGRFAEFLKLIVGNQADFKKHFELEEKAPLQFSKDTYEEDLEELLGKIGDDYADLFTLAKNLYDAILLSGILTADDSSTKAPLSASMIQRYNEHQMDLAQLKQFIRQKLSDKYNEVFSDVSKDGYAGYIDGKTNQEAFYKYLKGLLNKIEGSGYFLDKIEREDFLRKQRTFDNGSIPHQIHLQEMRAIIRRQAEFYPFLADNQDRIEKILTFRIPYYVGPLARGKSDFAWLSRKSADKITPWNFDEIVDKESSAEAFINRMTNYDLYLPNQKVLPKHSLLYEKFTVYNELTKVKYKTEQGKTAFFDANMKQEIFDGVFKVYRKVTKDKLMDFLEKEFDEFRIVDLTGLDKENKVFNASYGTYHDLCKILDKDFLDNSKNEKILEDIVLTLTLFEDREMIRKRLENYSDLLTKEQVKKLERRHYTGWGRLSAELIHGIRNKESRKTILDYLIDDGNSNRNFMQLINDDALSFKEEIAKAQVIGETDNLNQVVSDIAGSPAIKKGILQSLKIVDELVKIMGHQPENIVVEMARENQFTNQGRRNSQQRLKGLTDSIKEFGSQILKEHPVENSQLQNDRLFLYYLQNGRDMYTGEELDIDYLSQYDIDHIIPQAFIKDNSIDNRVLTSSKENRGKSDDVPSKDVVRKMKSYWSKLLSAKLITQRKFDNLTKAERGGLTDDDKAGFIKRQLVETRQITKHVARILDERFYTETDENNKKIRQVKIVTLKSNLVSNFRKEFELYKVREINDYHHAHDAYLNAVIGKALLGVYPQLEPEFVYGDYPHFHGHKENKATAKKFFYSNIMNFFKKDDVRTDKNGEIIWKKDEHISNIKKVLSYPQVNIVKKVEEQTGGFSKESILPKGNSDKLIPRKTKKFYWDTKKYGGFDSPIVAYSILVIADIEKGKSKKLKTVKALVGVTIMEKMTFERDPVAFLERKGYRNVQEENIIKLPKYSLFKLENGRKRLLASARELQKGNEIVLPNHLGTLLYHAKNIHKVDEPKHLDYVDKHKDEFKELLDVVSNFSKKYTLAEGNLEKIKELYAQNNGEDLKELASSFINLLTFTAIGAPATFKFFDKNIDRKRYTSTTEILNATLIHQSITGLYETRIDLSKLGGD

SEQ ID NO: 651 - protein, 1355 aa, Streptococcus mutans NMT4863
MKKPYSIGLDIGTNSVGWAVVTDDYKVPAKKMKVLGNTDKSHIKKNLLGALLFDSGNTAEDRRLKRTARRRYTRRRNRILYLQEIFAEEMSKVDDSFFHRLDESFLTDDDKNFDSHPIFGNKAEEDAYHQKFPTIYHLRKHLADSTEKADLRLVYLALAHMIKFRGHFLIEGELNAENTDVQKLFADFVGVYDRTFDDSHLSEITVDASSILTEKISKSRRLEKLINNYPKEKKNTLFGNLIALSLGLQPNFKTNFKLSEDAKLQFSKDTYEEDLEELLGKIGDDYADLFTLAKNLYDAILLSGILTADDSSTKAPLSASMIKRYAEHHEDLEKLKEFIKANKPELYHDIFKDETKNGYAGYIENGVKQDEFYKYLKNTLSKITGSDYFLDQIEREDFLRKQRTFDNGSIPHQIHLQEMHAILRRQGDYYPFLKENQDRIEKILTFRIPYYVGPLARKNSRFAWAEYHSDEAVTPWNFDQVIDKESSAQAFIEHMTNNDLYLPNEKVLPKHSPLYEKYTVYNELTKIKYVTEIGEAKFFDANLKQEIFDGLFKHERKVTKKKLRTFLDKNFDEFRIVDIQGLDKETETFNASYATYQDLLKVIKDKVFMDNPENAEILENIVLTLTLFEDREMIKQRLAKYADVFDKKVIDQLARRHYTGWGRLSAKLLNGIRDKQSCKTIMDYLIDDAQSNRNLMQLITDDNLTFKDDIVKAQYVDNSDDLHQVVQSLAGSPAIKKGILQSLKIVDELVKVMGKEPEQIVVEMARENQTTAKGRRNSQQRYKRLKEAIKSLDRDLNHKILKEHPTDNQALQNNRLFLYYLQNGRDMYTGESLDINRLSDYDIDHVIPQAFIKDNSIDNRVLTSSKANRGKSDDVPSEDVVNRMRPFWNKLLSSGLISQRKYNNLTKKELTLDDKAGFIKRQLVETRQITKHVARMLDERFNKEFDDNNKRIRRVKIVTLKSNLVSSFRKEFELYKVREINDYHHAHDAYLNAVVVKALLVKYPKLEPEFVYGEYPKYNSYRERKTATQKMFFYSNIMNMFKSKVKLADDQIVERPMIEVNDETGEIAWDKTKHITTVKKVLSYPQVNIVKKVEEQTIGQNGGLFDDNPKSPLEVIPSKLVPLKKALNPEKYGGYQKPTTAYPILLIVDTKQLIPISVMDKKRFEQNPVKFLKDKGYQQIEKNNFVKLPKYTLVDIGNGIKRLWASSKEVHKGNQLVVSKKSQDLLYHAHHLDNDYSNEYVKNHYQQFDILFNEITSFSKKCKLGKEHIQKIEEAYSKERDFASIEELADGFIKLLGFTQLGATSPFSFLGIKLNQKQYTGKKDYLLPCMEATLIHQSITGLYETRIDLSKLGGD

SEQ ID NO: 652 - protein, 1337 aa, Streptococcus parauberis KRS-02109
MKVLGNTDRQTVKKNMIGTLLFDSGETAEARRLKRTARRRYTRRINRIKYLQSIFDDEMSKIDSAFFQRIKDSFLVPDDKNDDRHPIFGNIKDEVDYHKNYPTIYHLRKKLADSDEKADLRLIYLALAHIIKFRGHFLIEGDLDSQNTDVNALFLKLVDTYNLMFEDDKIDTQTIDATVILTEKMSKSRRLENLIAKIPNQKKNTLFGNLISLSLGLTPNFKANFELSEDAKLQISKESFEEDLDNLLAQIGDQYADLFIAAKNLSDAILLSDILTVKGVNTKAPLSASMVQRFNEHQDDLKLLKKLVKVQLPEKYKEIFDIKDKNGYAGYINGKTSQEDFYKYIKPILSKLKGAESLISKLEREDFLRKQRTFDNGSIPHQIHLNELKSIIRRQEKYYPFLKDKQVRIEKIFTFRIPYFVGPLANGNSSFAWVKRRSNESITPWNFEEVVEQEASAKVFIERMTNFDTYLPEEKVLPKHSLLYEMFTVYNELTKVKYQAEGMRKPEFLSSEEKIEIVSNLFKTERKVTVKQLKENYFNKIRCLDSITISGVEDKFNASLGTYHDLLNIIKNQKILDDEQNQDSLEDIVLTLTLFEDEKMIAKRLSKYESIFDPSILKKLKKRHYTGWGRLSQKLINGIRDKQTGKTILDFLIEDGQANRNFMQLINDPSLDFASIIKEAQEKTIKSEKLEETIANLAGSPAIKKGILQSVKIVDEVVKVMGYEPSNIVIEMARENQSTQRGINNSRERLRKLEEVHKNIGSKILKEHEISNAQLQSDRVYLYLLQDGKDMYTGKDLDFDRLSQYDIDHIIPQSFIKDNSIDNIVLTSQESNRGKSDNVPYIAIVNKMKSYWQHQLKSGAISQRKFDNLTKAERGGLSEYDKAGFIKRQLVETRQITKHVAQILNNRFNNNVDDSSKNKRPVKIITLKSKMVSDFRKEFGFYKIREVNDYHHAHDAYLNAVVGTALLKKYPKLEAEFVYGDYKHYDLASLVVKSDTSLGKATAKMFFYSNIMNFFKKEVRLADGTVITRPQIETNTETGEIVWDKVKDIKTIRKVLSIPQINVVKKTEVQTGGFSKESILSKRDSDKLIPRKNNWDPKKYGGFGSPIIAYSVLVVAKVTKGKSQKTKSVKELVGITIMEQNEFEKDRITFLEKKGYQDIQESLIIKLPKFSLFELENGRKRLLASAKELQKGNELSLPNKYIQFLYLASRYTSFSGKEEDREKHRHFVESHLHYFDEIKDIIADFSRRYILADANLEKILTLYNEKNQFSIEEQATNMLNLFTFTGLGAPATLKFFNVDIDRKRYTSSTEILNSTLIRQSITGLYETRIDLSKIGGD

SEQ ID NO: 653 - protein, 1370 aa, Streptococcus agalactiae FSL S3-026
MNKPYSIGLDIGTNSVGWSIITDDYKVPAKKMRVLGNTDKEYIKKNLIGALLFDGGNTAADRRLKRTARRRYTRRRNRILYLQEIFAEEMSKVDDSFFHRLEDSFLVEEDKRGSKYPIFATMQEEKYYHEKFPTIYHLRKELADKKEKADLRLIYLALAHIIKFRGHFLIEDDRFDVRNTDIQKQYQAFLEIFDTTFENNDLLSQNVDVEAILTDKISKSAKKDRILARYPNQKSTGIFAEFLKLIVGNQADFKKHFNLEDKTPLQFAKDSYDEDLENLLGQIGDEFADLFSAAKKLYDSVLLSGILTVTDLSTKAPLSASMIQRYDEHREDLKQLKQFVKASLPEKYQEIFADSSKDGYAGYIEGKTNQEAFYKYLSKLLTKQEGSEYLLEKIKNEDFLRKQRTFDNGSIPHQVHLTELRAIIRRQSEYYPFLKENLDRIEKILTFRIPYYVGPLAREKSDFAWMTRKTDDSIRPWNFEDLVDKEKSAEAFIHRMTNNDLYLPEEKVLPKHSLIYEKFTVYNELTKVRFLAEGFKDFQFLNRKQKETIFNSLFKEKRKVTEKDIISFLNKVDGYEGIAIKGIEKQFNASLSTYHDLKKILGKDFLDNTDNELILEDIVQTLTLFEDREMIRKRLDIYKDFFTESQLKKLYRRHYTGWGRLSAKLINGIRNKENQKTILDYLIDDGSANRNFMQLIKDAGLSFKPIIDKARTGSHSDNLKEVVGELAGSPAIKKGILQSLKIVDELVKVMGYEPEQIVVEMARENQTTAKGLSRLRQRLTTLRESLANLKSNILEEKKPKYVKDQVENHHLSDDRLFLYYLQNGKDMYTDDELDIDNLSQYDIDHIIPQAFIKDDSIDNRVLVSSAKNRGKSDDVPSVEIVKDCKVFWKKLLDAKLMSQRKYDNLTKAERGGLTSDDKARFIQRQLVETRQITKHVARILDERFNNELDSKGRRIRKVKIVTLKSNLVSNFRKEFGFYKIREVNNYHHAHDAYLNAVVAKAILTKYPQLEPEFVYGDYPKYNSYKTRKSATEKLFFYSNIMNFFKTKVTLADGTVVVKDDIEVNNDTGEIVWDKKKHFATVRKVLSYPQVNIVKKTEIQTGGFSKESILAHGNSDKLIPRKTKDIYLDPKKYGGFDSPIVAYSVLVVADIKKGKAQKLKTVTELLGITIMERSRFEKNPSAFLESKGYLNIRDDKLMILPKYSLFELENGRRRLLASADELQKGNELALPTQFMKFLYLASRYNELKGKPEEIEQKQEFVVQHVSYFDDILQIINDFSNRVILADANLEKINKLYQDNKENIPVDELANNIINLFTFTSLGAPAAFKFFDKIVDRKRYTSTKEVLNSTLIHQSITGLYETRIDLGKLGED

SEQ ID NO: 654 - protein, 1345 aa, Streptococcus mutans 5SM3
MKKPYSIGLDIGTNSVGWAVVTDDYKVPAKKMKVLGNTDKSHIEKNLLGALLFDSGNTAEDRRLKRTARRRYTRRRNRILYLQEIFSEEMGKVDDSFFHRLEDFFLVTEDKRGERHPIFGNLEEEVKYHENFPTIYHLRQYLADNPEKVDLRLVYLALAHIIKFRGHFLIEGKFDTRNNDVQRLFQEFLAVYDNTFENSSLQEQNVQVEEILTDKISKSAKKDRVLKLFPNEKSNGRFAEFLKLIVGNQADFKKHFELEEKAPLQFSKDTYEEELEVLLAQIGDNYAELFLSAKKLYDSILLSGILTADDSSTKAPLSASMIQRYNEHQMDLAQLKQFIRQKLSDKYNEVFSDVSKDGYAGYIDGKTNQEAFYKYLKGLLNKIEGSGYFLDKIEREDFLRKQRTFDNGSIPHQIHLQEMRAIIRRQSEFYPFLADNQDRIEKILTFRIPYYVGPLARGKSDFAWLSRKSADKITPWNFDEIVDKESSAEAFINRMTNYDLYLPNQKVLPKHSLLYEKFTVYNELTKVKYKTEQGETAFFDANMKQEIFDGVFKVYRKVTKDKLMDFLEKEFDEFRIVDLTGLDKENKAFNASYGTYHDLRKILDKDFLDNSKNEKILEDIVLTLTLFEDREMIRKRLKNYSDLLTKEQLKKLERRHYTGWGRLSAELIHGIRNKESRKTILDYLIDDGNSNRNFMQLINDDALSFKEEIAKAQVIGETDNLNQVVSDIAGSPAIKKGILQSLKIVDELVKIMGHQPENIVVEMARENQFTNQGRRNSQQRLKGLTDSIKEFGSQILKEHPVENSQLQNDRLFLYYLQNGRDMYTGEELDIDYLSQYDIDHIIPQAFIKDNSIDNRVLTSSKENRGKSDDVPSKDVVRKMKPYWSKLLSAKLITQRKFDNLTKAERGGLTDDDKAGFIKRQLVETRQITKHVARILDERFNTETDENNKKIRQVKIVTLKSNLVSNFRKEFELYKVREINDYHHAHDAYLNAVIGKALLGVYPQLEPEFVYGDYPHFHGHEENKATAKKFFYSNIMNFFKKDDVRTDKNGEIIWKKDEHISNIKKVLSYPQVNIVKKVEEQTGGFSKESILPKGNSDKLIPRKTKKFYWDTKKYGGFDSPIVAYSILVIADIEKGKSKKLKTVKALVGVTIMEKMTFERDPVAFLERKGYRNVQEENIIKLPKYSLFKLENGRKRLLASARELQKGNEIVLPNHLGTLLYHAKNIHKVDEPKHLDYVDKHKDEFKELLDVVSNFSKKYTLAEGNLEKIKELYAQNNGEDLKELASSFINLLTFTAIGAPATFKFFDKNIDRKRYTSTTEILNATLIHQSITGLYETRIDLSKLGGD

SEQ ID NO: 655 - protein, 1345 aa, Streptococcus mutans NFSM2; identical to SEQ ID NO: 612

SEQ ID NO: 656 - protein, 1370 aa, Streptococcus agalactiae SS1014; identical to SEQ ID NO: 575

SEQ ID NO: 657 - protein, 1370 aa, Streptococcus agalactiae STIR-CD-17; identical to SEQ ID NO: 580

SEQ ID NO: 658 - protein, 1373 aa, Streptococcus bovis ATCC 700338
MTKKNYSIGLDIGTNSVGWAVITDDYKVPAKKMKVLGNTDKKYIKKNLLGALLFDSGETAEATRLKRTARRRYTRRKNRLRYLQEIFAEEMTKVDESFFQRLDESFLRWDDDNKKLGRYPIFGNKADVVKYHQEFPTIYHLRKHLADSSEKADLRLVYLALAHMIKFRGHFLIEGELNAENTDVQKIFADFVGVYDRTFDDSHLSEITVDAASILTEKISKSRRLENLIKYYPTEKKNTLFGNLIALALGLQPNFKMNFKLSEDAKLQFSKDSYEEDLGELLGKIGDDYADLFTSAKNLYDAILLSGILIVDDNSTKAPLSASMIKRYVEHQEDLEKLKEFIKANKSELYHDIFKDKNKNGYAGYIENGVKQDEFYKYLKNTLSKIAGSDYFLDKIEREDFLRKQRTFDNGSIPHQIHLQEMHAILRRQGDYYPFLKENQDRIEKILTFRIPYYVGPLARKDSRFSWAEYHSDEKITPWNFDKVIDKEKSAEKFITRMTLNDLYLPEEKVLPKHSHVYETYAVYNELTKIKYVNEQGKDSFFDSNMKQEIFDHVFKENRKVTKEKLLNYLNKEFPEYRIKDLIGLDKENKSFNASLGTYHDLKKILDKAFLDDKVNEEVIEDIIKTLTLFEDKDMIHERLQKYSDIFTADQLKKLERRHYTGWGRLSYKLINGIRNKENNKTILDYLIDDGSANRNFMQLINDDTLPFKQIIQKSQVVGDVDDIEAVVHDLPGSPAIKKGILQSVKIVDELVKVMGDNPDNIVIEMARENQTTNRGRSQSQQRLKKLQNSLKELGSNILNEEKPSYIEDKVENSHLQNDQLFLYYIQNGKDMYTGDELDIDHLSDYDIDHIIPQAFIKDDSIDNRVLTSSAKNRGKSDDVPSLDIVRARKAEWVRLYKSGLISKRKFDNLTKAERGGLTEADKAGFIKRQLVETRQITKHVAQILDARFNTESDENDKVIRDVKVITLKSNLVSQFRKDFEFYKVREINDYHHAHDAYLNAVVGTALLKKYPKLASEFVYGEYKKYDIRKFITNSSDKATAKYFFYSNLMNFFKRVIRYSNGKVIVRPVVEYSKDTEDIAWDKKSNFRTICKVLSYPQVNIVKKVETQTGGFSKESILPKGDSDKLIPRKTKKAYWDTKKYGGFDSPTVAYSVFVVADVEKGKAKKLKTVKELVGISIMERSFFEENPVEFLENKGYHNIREDKLIKLPKYSLFEFEGGKRRLLASASELQKGNEMVIPGHLVKLLYHAQRINSFNSTKYLDYVSAHKKEFEKVLSCVEDFANLYVDVEKNLSKIRAVADSMDNFSIEEISNSFINLLTLTALGAPADFNFLGEKIPRKRYTSTKECLNATLIHQSITGLYETRIDLSKIGEE

SEQ ID NO: 659 - protein, 1345 aa, Streptococcus mutans 3SN1; identical to SEQ ID NO: 609

SEQ ID NO: 660 - protein, 1326 aa, Streptococcus pseudoporcinus SPIN 20026
MLGTVLFDSGETAQARRLKRTNRRRYTRRRYRLCQLQNIFATEMVKVDDTFFQRLSESFFYYQDKAFDKHPIFGNSKEERAYHKTYPTIYHLRKDLADRDQKADLRLIYLALSHIIKFRGHFLIEGKLNSENTDVQKLFIALVTVYNLLFEEEPIAGETCDAKALLTAKTSKSKRLESLISEFPGQKKNGLFGNLLALALGLRPNFKSNFGLSEDAKLQITKDTYEEELDNLLAEIGDHYADLFLAAKNLSDAILLSDILTLSDENTRAPLSASMIKRYEEHQEDLALLKKLVKEQMPEKYWEIFSNAKKNGYAGYIEGKVSQEDFYRYIKPILSRLKGGDEFLAKIDRDDFLRKQRTFDNGSIPHQIHLKELHAILRRQEKYYPFLAEQKEKIEQLLCFRIPYYVGPLAKGGNSSFAWLKRRSDEPITPWNFKDVVDEEASAQAFIEGMTNYDTYLPEEKVLPKHSPLYEMFTVYNELTKVKYIAENMTKPLYLSAEQKEAIIDHLFKQTRKVTVKDLKEKYFSQIEGLENVDVTGVEGAFNASLGTYNDLLKIIKDKAFLDDEANAEILEEIVLILTLFQDEKLIEKRLAKYANLFEKSVLKKLRKRHYRGWGRLSRQLIDGMKDKASGKTILDFLKADDFANRNFIQLINDSSLDFEKLIDDAQKKAIKRESLTEAVANLAGSPAIKKGILQSLKVVDEIVKVMGHNPDNIVIEMSRENQTTAQGLKNARQRLKKIKEVHKKTGSRILEDNSERITNLTLQDNRLYLYLLQDGKDMYTGQDLDINNLSQYDIDHIIPQSFIKDNSIDNLVLTTQKANRGKSDNVPSIEVVRDMKDRVWRRQLANGAISRQKFDHLTKAERGGLADSDKARFLRRQLVETRQITKHVAQLLDSRFNSKSNQNKKLARNVKIITLKSKIVSDFRKDFGLYKLREVNNYHHAHDAYLNAVVGTALLKKYPKLEAEFVYGDYKHFDLVKLISKSDPSLGKATAKVFFYSNIMNFFKEELSLADGTLMKRPVIETNTETGEVVWDKVKDFKTIRKVLSYPQVNIVKKTEIQSGAFSKESVLSKGNSDKLIERKKGWDPKKYGGFDSPNTAYSIFVVAKVAKRKAQKLKTVKEIVGITIMEQAEYEKDNIAFLEKKGYQDIQEKLLIKLPKYSLFELENGRRRLLASANEFQKGNELALSGKYMKFLYLASRYDKLSSKIESEQQKKLFVEQHLHYFDEILDIVVKHATCYIKAENNLKKIISLYKKKEAYSINEQALNMLNLFIFTSLGAPSTFVFFDETIDRKRYTTSSDVLNGILIQQSITGLYETRIDLSRFGGD

SEQ ID NO: 661 - protein, 1345 aa, Streptococcus mutans R221
MKKPYSIGLDIGTNSVGWAVVTDDYKVPAKKMKVLGNTDKSHIKKNLLGALLFDSGNTAEDRRLKRTARRRYTRRRNRILYLQEIFSEEMGKVDDSFFHRLEDSFLVTEDKRGERHPIFGNLEEEVKYHENFPTIYHLRQYLADNPEKTDLRLVYLALAHIIKFRGHFLIEGKFDTRNNDVQRLFQEFLAVYDNTFENSSLQEQNVQVEEILTDKISKSAKKDRVLKLFPNEKSNGRFAEFLKLIVGNQADFKKHFELEEKAPLQFSKDIYEEELEVLLAQIGDNYAELFLSAKKLYDSILLSGILTVTDVSTKAPLSASMIQRYNEHQMDLAQLKQFIRQKLSDKYNEVFSDVSKDGYAGYIDGKTNQEAFYKYLKGLLNKIEGSGYFLDKIEREDFLRKQRTFDNGSIPHQIHLQEMRAIIRRQAEFYPFLADNQDRIEKILTFRIPYYVGPLARGKSDFAWLSRKSADKITPWNFDEIVDKESSVEAFINRMTNYDLYLPNQKVLPKHSLLYEKFTVYNELTKVKYKTEQGKTAFFDANMKQEIFDGVFKVYRKVTKDKLMDFLEKEFDEFRIVDLTGLDKENKAFNASYGTYHDLRKILDKDFLDNSKNEKILEDIVLTLTLFEDREMIRKRLKNYSDLLTKEQLKKLERRHYTGWGRLSAELIHGIRNKESRKTILDYLIDDGNSNRNFMQLINDDALSFKEEIAKAQVIGETDNLNQVVSDIAGSPAIKKGILQSLKIVDELVKIMGHQPENIVVEMARENQFTNQGRRNSQQRLKGLTDSIKEFGSQILKEHPVENSQLQNDRLFLYYLQNGRDMYTGEELDIDYLSQYDIDHIIPQAFIKDNSIDNRVLTSSKENRGKSDDVPSKDVVRKMKSYWSKLLSAKLITQRKFDNLTKAERGGLTDDDKAGFIKRQLVETRQITKHVARILDERFNTETDENNKKIRQVKIVTLKSNLVSNFRKEFELYKVREINDYHHAHDAYLNAVIGKALLGVYPQLEPEFVYGDYPHFHGHKENKATAKKFFYSNIMNFFKKDDVRTDKNGEIIWKKDEHISNIKKVLSYPQVNIVKKVEEQTGGFSKESILPKGNSDKLIPRKTKKFYWDTKKYGGFDSPIVAYSILVIADIEKGKSKKLKTVKALVGVTIMEKMTFERDPVAFLERKGYRNVQEENIIKLPKYSLFKLENGRKRLLASARELQKGNEIVLPNHLGTLLYHAKNIHKVDEPKHLDYVDKHKDEFKELLDVVSNFSKKYTLAEGNLEKIKELYAQNNGEDLKELASSFINLLTFTAIGAPATFKFFDKNIDRKRYTSTTEILNATLIHQSITGLYETRIDLNKLGGD

SEQ ID NO: 662 - protein, 1345 aa, Streptococcus mutans N3209
MKKPYSIGLDIGTNSVGWAVVTDDYKVPAKKMKVLGNTDKSHIKKNLLGALLFDSGNTAEDRRLKRTTRRRYTRRRNRILYLQEIFSEEMGKVDDSFFHRLEDSFLVTEDKRGERHPIFGNLEEEVKYHENFPTIYHLRQYLADNPEKTDLRLVYLALAHIIKFRGHFLIEGKFDTRNNDVQRLFQEFLAVYDNTFENSSLQEQNVQVEEILTDKISKSAKKDRVLKLFPNEKSNGCFAEFLKLIVGNQADFKKHFELEEKAPLQFSKDTYEEELEVLLAQIGDNYAELFLSAKKLYDSILLSGILTVTDVSTKAPLSASMIQRYNEHQMDLTQLKQFIRQKLSDKYNEVFSDVSKDGYAGYIDGKTNQEAFYKYLKGLLNKIEGSGYFLDKIEREDFLRKQRTFDNGSIPHQIHLQEMRAIIRRQAEFYPFLADNQDRIEKLLTFRIPYYVGPLASGKSDFAWLSRKSADKITPWNFDEIVDKESSAEAFINRMTNYDLYLPNQKVLPKHSLLYEKFTVYNELTKVKYKTEQGKTAFFDANMKQEIFDGVFKVYRKVTKDKLMDFLEKEFDEFRIVDLTGLDKENKVFNASYGTYHDLCKILDKDFLDNSKNEKILEDIVLTLTLFEDREMIRKRLENYSDLLTKEQVKKLERRHYTGWGRLSAELIHGIRNKESRKTILDYLIDDGNSNRNFMQLINDDALSFKEEIAKAQVIGETDNLNQVVSDIAGSPAIKKGILQSLKIVDELVKIMGHQPENIVVEMARENQFTNQGRRNSQQRLKGLTDSIKEFGSQILKEHPVENSQLQNDRLFLYYLQNGRDMYTGEELDIDYLSQYDIDHIIPQAFIKDNSIDNRVLTSSKENRGKSDDVPSKDVVRKMKSYWSKLLSAKLITQRKFDNLTKAERGGLTDDDKAGFIKRQLVETRQITKHVARILDERFNTETDENNKKIRQVKIVTLKSNLVSNFRKEFELYKVREINDYHHAHDAYLNAVIGKALLGVYPQLEPEFVYGDYPHFHGHKENKATAKKFFYSNIMNFFKKDDVRTDKNGEIIWKKDEHISNIKKVLSYPQVNIVKKVEEQTGGFSKESILPKGNSDKLIPRKTKKFYWDTKKYGGFDSPIVAYSILVIADIEKGKSKKLKTVKALVGVTIMEKMTFERDPVAFLERKGYRNVQEENIIKLPKYSLFKLENGRKRLLASARELQKGNEIVLPNHLGTLLYHAKNIHKVDEPKHLDYVDKHKDEFKELLDVVSNFSKKYTLAEGNLEKIKELYAQNNGEDLKELASSFINLLTFTAIGAPATFKFFDKNIDRKRYTSTTEILNATLIHQSITGLYETRIDLSKLGGD

SEQ ID NO: 663 - protein, 1345 aa, Streptococcus mutans NLML1; identical to SEQ ID NO: 606

SEQ ID NO: 664 - protein, 1345 aa, Streptococcus mutans N29
MKKPYSIGLDIGTNSVGWAVVTDDYKVPAKKMKVLGNTDKSHIKKNLLGALLFDSGNTAADRRLKRTARRRYTRRRNRILYLQEIFAEEMSKVDDSFFHRLEDSFLVTEDKRGERHPIFGNLEEEVKYHENFPTIYHLRQYLADNPEKVDLRLVYLALAHIIKFRGHFLIEGKFDTRNNDVQRLFQEFLAVYDNTFENSSLQEQNVQVEEILTDKISKSAKKDRVLKLFPNEKSNGRFAEFLKLIVGNQADFKKHFELEEKAPLQFSKDTYEEELEVLLAQIGDNYAELFLSAKKLYDSILLSGILTVTDVSTKAPLSASMIQRYNEHQMDLAQLKQFIRQKLSDKYNEVFSDVSKDGYAGYIDGKTNQEAFYKYLKGLLNKIEGSGYFLDKIEREDFLRKQRTFDNGSIPHQIHLQEMRAIIRRQAEFYPFLADNQDRIEKILTFRIPYYVGPLARGKSDFAWLSRKSADKITPWNFDEIVDKESSAEAFINRMTNYDLYLPNQKVLPKHSLLYEKFTVYNELTKVKYKTEQGKTAFFDANMKQEIFDGVFKVYRKVTKDKLMDFLEKEFDEFRIVDLTGLDKENKAFNASYGTYHDLRKILDKDFLDNSKNEKILEDIVLTLTLFEDREMIRKRLENYSDLLTKEQVKKLERRHYTGWGRLSAELIHGIRNKESRKTILDYLIDDGNSNRNFMQLINDDALSFKEEIAKAQVIGETDNLNQVVSDIAGSPAIKKGILQSLKIVDELVKIMGHQPENIVVEMARENQFTNQGRRNSQQRLKGLTDSIKEFGSQILKEHPVENSQLQNDRLFLYYLQNGRDMYTGEELDIDYLSQYDIDHIIPQAFIKDNSIDNRVLTSSKENRGKSDDVPSKNVVRKMKSYWSKLLSAKLITQRKFDNLTKAERGGLTDDDKAGFIKRQLVETRQITKHVARILDERFHTETDENNKKIRQVKIVTLKSNLVSNFRKEFELYKVREINDYHHAHDAYLNAVIGKALLGVYPQLEPEFVYGDYPHFHGHKENKATAKKFFYSNIMNFFKKDDVRTDKNGEIIWKKDEHISNIKKVLSYPQVNIVKKVEEQTGGFSKESILPKGNSDKLIPRKTKKFYWDTKKYGGFDSPIVAYSILVIADIEKGKSKKLKTVKALVGVTIMEKMTFERDPVAFLERKGYRNVQEENIIKLPKYSLFKLENGRKRLLASARELQKGNEIVLPNHLGTLLYHAKNIHKVDEPKHLDYVDKHKDEFKELLDVVSNFSKKYTLAEGNLEKIKELYAQNNGEDLKELSSSFINLLTFTAIGAPAAFKFFDKNIDRKRYTSTTEILNATLIHQSITGLYETRIDLSKLGGD

SEQ ID NO: 665 - protein, 1377 aa, Streptococcus equinus ATCC 9812
MEKTYSIGLDIGTNSVGWAVITDDYKVPAKKMKVLGNTDKKYIKKNLLGALLFDSGETAEATRLKRAARRRYTRRKNRLRYLQEIFAKEMAKVDESFFQRLEESFLTDDDKTFDSHPIFGNKAEEDTYHQEFPTIYHLRKHLADSPEKVDLRLVYLALAHMIKFRGHFLIEGQLNAENTDVQKIFADFVGVYDRTFDDSHLSEITVDAASILTEKISKSRRLENLIKQYPTEKKNTLFGNLVALALGLQPNFKTNFKLSEDAKLQFSKDTYDEDLEELLGKIGDDYADLFTAAKNLYDAILLSGILTVDDNSTKAPLSASMIKRYEEHHEDLEKLKTFIKVNNFDKYHEIFKDKSKNGYAGYIENGVKQDIFYKHLKSIISEKNGGQYFLDKIEREDFLRKQRTFDNGSIPYQIHLQEMRTILRRQGEYYPFLKENQAKIEKILTFRIPYYVGPLARKNSRFAWAKYHSDEPITPWNFDEVVDKEKSAEKFITRMTLNDLYLPEEKVLPKHSYVYETFAVYNELTKIKYVNEQGKSFFFDANMKQEIFDHVFKENRKVTKAKLLSYLNNEFEEFRINDLIGLDKDSKSFNASLGTYHDLKKILDKSFLDDKTNEQIIEDIVLTLTLFEDRDMIHERLQKYSDIFTSQQLKKLERRHYTGWGRLSYKLINGIRNKENNKTILDFLIDDGDANRNFMQLINDDSLSFKTTIQEAQVVGDVDDIEAVVHDLPGSPAIKKGILQSVKIVDELVKVMGHNPQNIVIEMARENQITGYGRNRSNQRLKRLQDSLKEFGSDILSKKKPSYVDSKVENSHLQNDRLFLYYIQNGKDMYTGEELDIDHLSDYDIDHIIPQAFIKDNSIDNRVLTSSAKNRGKSDDVPSIEIVRNRKSYWYKLYKSGLISKRKFDNLTKAERGGLTETDKAGFIKRQLVETRQITKHVAQILDARFNTKCDENDKVIRDVKVITLKSSLVSQFRKEFKFYKVREINDYHHAHDAYLNAVVGTALLKKYPKLAPEFVYGEYKKYDVRKLVAKSSDNHSELGKATAKYFFYSNLMNFFKTEVKYADGRVFERPDIETNADGEVVWNKQRDFNIVRKVLSYPQVNIVKKVEVQTGGFSKESILPKGDSDKLIPRKTKKLQWETQKYGGFDSPTVAYSVLVVADVEKGKTRKLKTVKELVGISIMERSSFEENPVSFLEKKGYHNVQEDKLIKLPKYSLFEFEGGRRRLLASATELQKGNEVVLPQYMVNLLYHSQHVNNSHKPEHLNYVKQHKDEFKDIFNLIISIARINILKPKVVDNLINEFTEYGQEDISSLSESFINLLKFISFGAPGAFKFLKLDVKQSNLRYKSTTEALSATLIHQSVTGLYETRIDLSKLGEE

SEQ ID NO: 666 - protein, 1345 aa, Streptococcus mutans NVAB; identical to SEQ ID NO: 581

SEQ ID NO: 667 - protein, 1373 aa, Streptococcus oralis SK304
MENKNYSIGLDIGTNSVGWAVITDDYKVPSKKMKVLGNTDKRFIKKNLIGALLFDEGTTAEARRLKRTARRRYTRRKNRLRYLQEIFAEEMSKVDSSFFHRLDDSFLIPEDKKGSKYPIFATLIEEKEYHKQFPTIYHLRKQLADSKEKTDLRLIYLALAHMIKYRGHFLYEDTFDIKNNDIQKIFNEFISIYNNTFEGNSLSGQNVQVEAIFTDKISKSAKRERVLKLFPDEKSTGLFSEFLKLIVGNQADFKKHFDLEEKAPLQFSRDTYDEDLENLLGQIGDDFADLFVAAKKLYDAILLSGILTVTDPSTKAPLSASMIERYENHQKDLATLKQFIKTNLPEKYDEVFSDQSKDGYAGYIDGKTTQESFYKYIKNLLSKFEGADYFLEKIEREDFLRKQRTFDNGSIPHQIHLQEMNAILRRQGEHYPFLKENKEKIEKILTFRIPYYVGPLARGNRDFAWLTRNSDQAIRPWNFEEIVDKASSAESFINKMTNYDLYLPEEKVLPKHSLLYETFAVYNELTKVKFIAEGLRDYQFLDSRQKKDIFYTLFKAEDKRKVTEKDIIQYLHTVDGYDGIELKGIEKQFNASLSTYHDLLKIIKDKEFMDDPNNEEILENIVHTLTIFEDREMIKQRLAQYDSLFDEKVIKALTRRHYTGWGKLSSKLINGIRDKQTGKTILDYLMDDGYNNRNFMQLINDDELSFKEIIKKAQVVGKTDDVKQVVQELPGSPAIKKGILQSIKLVDELVKVMGHEPESIVIEMARENQTTARGKKNSQQRYKRIEDSLKILASGLNAKILKEHPTDNIQLQNDRLFLYYLQNGRDMYTGKPLDINQLSSYDIDHIVPQAFIKDDSLDNRVLTSLKDNRGKSDNVPSLEVVEKMKTFWQQLLDSKLISYRKFNNLTKAERGGLDERDKVGFIKRQLVETRQITKHVAQILDARYNTEVNEKDKKNRTVKIITLKSNLVSNFRKEFRLYKIREINDYHHAHDAYLNAVVAKAILKKYPKLEPEFVYGDYQKYDLKRYISRSKDPKEIEKATEKYFFYSNLLNFFKEEVHYADGTIVKRENIEYSKDTGEIAWNKEKDFATIKKVLSLPQVNIVKKREVQTGGFSKESILPKGNSDKLIPRKTKDILWDTTKYGGFDSPVIAYSILLIADIEKGKAKRLKTVKTLVGITIMEKATFEKSPIAFLENKGYHNVRKENILCLPKYSLFELKNGRRRMLASAKELQKGNEIVLPVHLTTLLYHAKNIHRLDEPEHLEYIQKHRNEFKGLLNLVSEFSQKYVLADANLEKIKNLYADNEQADIEILANSFINLLTFTALGAPAAFKFFGKDVDRKRYTTVSEILNATLIHQSITGLYETRIDLSKLGED

SEQ ID NO: 668 - protein, 1355 aa, Streptococcus mutans 15VF2
MKKSYSIGLDIGTNSVGWAVVTDDYKVPAKKMKVLGNTDKSHIKKNLLGALLFDSGNTAEDRRLKRTARRRYTRRRNRILYLQEIFSEEMGKVDDSFFHRLDESFLTDDDKNFDSHPIFGNKAEEDAYHQKFPTIYHLRKHLADSTEKADLRLVYLALAHMIKFRGHFLIEGELNAENTDVQKLFADFVGVYDRTFDDSHLSEITVDASSILTEKISKSRRLEKLINNYPKEKKNTLFGNLIALSLGLQPNFKTNFKLSEDAKLQFSKDTYEEDLEELLGKIGDDYADLFTLAKNLYDAILLSGILTADDSSTKAPLSASMIKRYAEHHEDLEKLKEFIKANKPELYHDIFKDETKNGYAGYIENGVKQDEFYKYLKNTLSKIAGSDYFLDKIEREDFLRKQRTFDNGSIPHQIHLQEMHAILRRQGDYYPFLKENQDRIEKILTFRIPYYVGPLARKNSRFAWAEYHSDEAVMPWNFDQVIDKESSAQAFIEHMTNNDLYLPNEKVLPKHSPLYEKYTVYNELTKIKYVTEIGEAKFFDANLKQEIFDGLFKHERKVTKKKLRTFLDKNFDEFRIVDIQGLDKETETFNASYATYQDLLKVIKDKVFMDNPENAEILENIVLTLTLFEDREMIKQRLAKYADVFDKKVIDQLARRHYTGWGRLSAKLLNGIRDKQSCKTIMDYLIDDAQSNRNLMQLITDDNLTFKDDIVKAQYVDNSDDLHQVVQSLAGSPAIKKGILQSLKIVDELVKVMGKEPEQIVVEMARENQTTAKGRRNSQQRYKRLKEAIKSLDRDLNHKILKEHPTDNQALQNNRLFLYYLQNGRDMYTGESLDINRLSDYDIDHVIPQAFIKDNSIDNRVLTSSKANRGKSDDVPSEDVVNRMRPFWNKLLSSGLISQRKYNNLTKKELTPDDKAGFIKRQLVETRQITKHVARMLDERFNKEFDDNNKRIRRVKIVTLKSNLVSSFRKEFELYKVREINDYHHAHDAYLNAVVVKALLVKYPKLEPEFVYGEYPKYNSYRERKTATQKMFFYSNIMNMFKSKVKLADDQIVERPMIEVNDETGEIAWDKTKHITTVKKVLSYPQVNIVKKVEEQTIGQNGGLFDDNPKSPLEVIPSKLVPLKKALNPEKYGGYQKPTTAYPILLIVDTKQLIPISVMDKKRFEQNPVKFLKDKGYQQIEKNNFVKLPKYTLVDIGNGIKRLWASSKEVHKGNQLVVSKKSQDLLYHAHHLDNDYSNEYVKNHYQQFDILFNEITSFSKKCKLGKEHIQKIEEAYSKERDSASIEELADGFIKLLGFTQLGATSPFSFLGIKLNQKQYTGKKDYLLPCMEATLIHQSITGLYETRIDLNKLGGD

SEQ ID NO: 669 - protein, 773 aa, Streptococcus agalactiae 18RS21
MNKPYSIGLDIGTNSVGWSIITDDYKVPAKKMRVLGNTDKEYIKKNLIGALLFDGGNTAADRRLKRTARRRYTRRRNRILYLQEIFAEEMSKVDDSFFHRLEDSFLVEEDKRGSKYPIFATLQEEKDYHEKFSTIYHLRKELADKKEKADLRLIYIALAHIIKFRGHFLIEDDSFDVRNTDISKQYQDFLEIFNTTFENNDLLSQNVDVEAILTDKISKSAKKDRILAQYPNQKSTGIFAEFLKLIVGNQADFKKYFNLEDKTPLQFAKDSYDEDLENLLGQIGDEFADLFSAAKKLYDSVLLSGILTVIDLSTKAPLSASMIQRYDEHREDLKQLKQFVKASLPEKYQEIFADSSKDGYAGYIEGKTNQEAFYKYLSKLLTKQEDSENFLEKIKNEDFLRKQRTFDNGSIPHQVHLTELKAIIRRQSEYYPFLKENQDRIEKILTFRIPYYIGPLAREKSDFAWMTRKTDDSIRPWNFEDLVDKEKSAEAFIHRMTNNDFYLPEEKVLPKHSLIYEKFTVYNELTKVRYKNEQGETYFFDSNIKQEIFDGVFKEHRKVSKKKLLDFLAKEYEEFRIVDVIGLDKENKAFNASLGTYHDLEKILDKDFLDNPDNESILEDIVQTLTLFEDREMIKKRLENYKDLFTESQLKKLYRRHYTGWGRLSAKLINGIRDKESQKTILDYLIDDGRSNRNFMQLINDDGLSFKSIISKAQAGSHSDNLKEVVGELAGSPAIKKGILQSLKIVDELVKVMGYEPEQIVVEMARENQTTNQ

SEQ ID NO: 670 - protein, 1345 aa, Streptococcus mutans SF14
MKKPYSIGLDIGTNSVGWAVVTDDYKVPAKKMKVLGNTDKSHIKKNLLGALLFDSGNTAEDRRLKRTARRRYTRRRNRILYLQEIFSEEMGKVNDSFFHRLEDSFLVTEDKRGERHPIFGNLEEEVKYHENFPTIYHLRQYLADNPEKVDLRLVYLALAHIIKFRGHFLIEGKFDTRNNDVQRLFQEFLAVYDNTFENSSLQEQNVQVEEILTDKISKSAKKDRVLKLFPNEKSNGRFAEFLKLIVGNQADFKKHFELEEKAPLQFSKDTYEEELEVLLAQIGDNYAELFLSAKKLYDSILLSGILTVTDVSTKAPLSASMIQRYNEHQMDLAQLKQFIRQKLSDKYNEVFSDVSKDGYAGYIDGKTNQEAFYKYLKGLLNKIEGSGYFLDKIEREDFLRKQRTFDNGSIPHQIHLQEMRAIIRRQAEFYPFLADNQDRIEKILTFRIPYYVGPLARGKSDFAWLSRKSADKITPWNFDEIVDKESSAEAFINRMTNYDLYLPNQKVLPKHSLLYEKFTVYNELTKVKYKTEQGKTAFFDANMKQEIFDGVFKVYRKVTKDKLMDFLEKEFDEFRIVDLTGLDKENKVFNASYGTYHDLCKILDKDFLDNSKNEKILEDIVLTLTLFEDREMIRKRLENYSDLLTKEQVKKLERRHYTGWGRLSAELIHGIRNKESRKTILDYLIDDGNSNRNFMQLINDDALSFKEEIAKAQVIGETDNLNQVVSDIAGSPAIKKGILQSLKIVDELVKIMGHQPENIVVEMARENQFTKQGRRNSQQRLKGLTDSIKEFGSQILKEHPVENSQLQNDRLFLYYLQNGRDMYTGEELDIDYLSQYDIDHIIPQAFIKDNSIDNRVLTSSKENRGKSDDVPSKDVVRKMKSYWSKLLSAKLITQRKFDNLTKAERGGLTDDDKAGFIKRQLVETRQITKHVARILDERFYTETDENNKKIRQVKIVTLKSNLVSNFRKEFELYKVREINDYHHAHDAYLNAVIGKALLGVYPQLEPEFVYGDYPHFHGHKENKATAKKFFYSNIMNFFKKDDVRTDKNGEIIWKKDEYISNIKKVLSYPQVNIVKKVEEQTGGFSKESILPKGNSDKLIPRKTKKFYWDTKKYGGFDSPIVAYSILVIADIEKGKSKKLKTVKALVGVTIMEKMTFERDPIAFLERKGYRNVQEENIIKLPKYSLFKLENGRKRLLASARELQKGNEIVLPNHLGTLLYHAKNIHKVDEPKHLDYVDKHKDEFKELLDVVSNFSKKYTLAEGNLEKIKELYAQNNGEDLKELASSFINLLTFTAIGAPAAFKFFDKNIDRKRYTSTTEILNATLIHQSITGLYETRIDLSKLGGD

SEQ ID NO: 671 - protein, 1345 aa, Streptococcus anginosus F0211
MDQKYSIGLDIGTNSVGWAVVTDDYKVPAKKMKVLGNTDKQSIKKNLLGALLFDSGETAEATRLKRTARRRYTRRRNRLRYLQEIFAEEMNKVDENFFQRLDDSFLVDEDKRGERHPIFGNIAAEVKYHDDFPTIYHLRKHLADISQKADLRLVYLALAHMIKFRGHFLIEGQLKAENTNVQALFKDFVEVYDKTVEESHLSEMTVDALSILTEKVSKSRRLENLIAHYPAEKKNTLFGNLIALSLGLQPNFKTNFQLSEDAKLQFSKDTYEEDLEGLLGEIGDEYADLFASAKNLYDAILLSGILTVDDNSTKAPLSASMVKRYEEHQKDLKKLKDFIKVNAPDQYNAIFKDKNKKGYAGYIENGVKQDEFYKYLKGILLQINGSGDFLDKIDREDFLRKQRTFDNGSIPHQIHLQEMHAILRRQEEHYPFLKENQDKIEKILTFRIPYYVGPLARKGSRFAWAEYKADEKITPWNFDDILDKEKSAEKFITRMTLNDLYLPEEKVLPKHSLLYETFTVYNELTKVKYVNEQGEAKFFDANMKQEIFDHVFKENRKVTKDKLLNYLNKEFEEFRIVNLTGLDKENKAFNSSLGTYHDLRKILDKSFLDDKANEKTIEDIIQTLTLFEDREMIRQRLQKYSDIFTKAQLKKLERRHYTGWGRLSYKLINGIRNKENKKTILDYLIDDGYANRNFMQLINDDALSFKEEIARAQIIGDVDDIANVVHDLPGSPAIKKGILQSVKIVDELVKVMGHNPANIIIEMARENQMTDKGRRNSQQRLKLLQDSLKNLDNPVNIKNVENQQLQNDRLFLYYIQNGKDMYTGETLDINNLSQYDIDHIIPQAFIKDNSLDNRVLTRSDKNRGKSDDVPSIEVVHEMKSFWSKLLSVKLITQRKFDNLTKAERGGLTEEDKAGFIKRQLVETRQITKHVAQILDERFNTEFDGNKRRIRNVKIITLKSNLVSNFRKEFELYKVREINDYHHAHDAYLNAVVGNALLLKYPQLEPEFVYGEYPKYNSYRSRKSATEKFLFYSNILRFFKKEDIQTNEDGEIAWNKEKHIKILRKVLSYPQVNIVKKTEEQTGGFSKESILPKGESDKLIPRKTKNSYWNPKKYGGFDSPVVAYSILVFADVEKGKSKKLRKVQDMVGITIMEKKRFEKHPVDFLEQRGYRNVRLEKIIKLPKYSLFELENKRRRLLASARELQKGNELVIPQRFTTLLYHSYQIEKNYEPEHREYVEKHKDEFKELLEYISVFSRKYVLADNNLTKIEMLFSKNKDAEVSSLAKSFISLLTFTAFGAPAAFNFFGENIDRKRYTSVTECLNATLIHQSITGLYETRIDLSKLGED

SEQ ID NO: 672 - protein, 1338 aa, Streptococcus macacae NCTC 11558
MTKPYSIGLDIGTNSVGWAVVTDGYKVPAKKMKVLGNTDKSHIKKNLLGALLFDSGNTAKDRRLKRTARRRYTRRRNRILYLQEIFAEEMAKADESFFQRLNESFLTNDDKEFDSHPIFGNKAEEEAHHHKFPTIFHLRKHLADSTEKSDLRLIYLALAHMIKFRGHFLIEGQLKAENTNVQTLFDDFVEVYDKTVEESHLSEISVSSILTEKISKSRRLENLIKYYPTEKKNTLFGNLIALSLGLQPNFKTNFKLSEDAKLQFSKDTYEEDLGELLGKIGDNYADLFISAKNLYDAILLSGILTIDDNTTKAPLSASMIKRYEEHQEDLAQLKKFIRQNLPDQYSEVFSDKTKDGYAGYIDGKTNQEAFYKYIKNMLSKTEGADYFLDKIDREDFLRKQRTFDNGSVPHQIHLQEMHAILRRQGEYYPFLKENQDKIEKILTFRIPYYVGPLARKGSRFAWAEYKADKKVTPWNFDDILDKEKSAEEFITRMTLNDLYLPEEKVLPKHSLVYETFNVYNELTKVKYVNEQGKAIFFDANMKQEIFDHVFKENRKVTKDKLLNYLNKEFEEFRIVNLTGLDKENKAFNSSLGTYHDLRKILDKSFLDDKVNEKIIEDIIQTLTLFEDREMIRQRLQKYSDIFTTQQLKKLERRHYTGWGRLSAKLINGIRDKQSNKTILGYLIDDGYSNRNFMQLINDDSLPFKEEIARAQVIGETDDLNQLVSDIAGSPAIKKGILQSLKIVDELVKVMGHNPANIVIEMARENQTTAKGRRSSQQRYKRLEEAIKNLDHDLNHKILKEHPTDNQALQNDRLFLYYLQNGRDMYTEDPLDINRLSDYDIDHIIPQSFIKDDSIDNKVLVSSAKNRGKSDNVPSEDVVNRMRPFWNKLLSCGLISQRKYSNLTKKELKPDDKAGFIKRQLVETRQITKHVAQILDARFNTKRDENKKVIRDVKIITLKSNLVSQFRKDFKFYKVREINDYHHAHDAYLNAVIGKALLDVYPQLEPEFVYGEYPHFHGYKENKATAKKFFYSNIMNFFKKDDIRTDENGEIVWKKDEHISNIKRVLSYPQVNIVKKVEIQTVGQNGGLFDDNPKSPLEVTPSKLVPLKKELNPKKYGGYQKPTTAYPVLLITDTKQLIPISVMNKKQFEQNPVKFLRDRGYQQVGKNDFIKLPKYTLVDIGDGIKRLWASSKEIHKGNQLVVSKKSQILLYHAHHLDSDLSNDYLQNHNQQFDVLFNEIISFSKKCKLGKEHIQKIENVYSNKKNSASIEELAESFIKLLGFTQLGATSPFNFLGVKLNQKQYKGKKDYILPCTEGTLIRQSITGLYETRVDLSKIGED

SEQ ID NO: 673 - protein, 1371 aa, Streptococcus sp. F0441
MENKNYSIGLDIGTNSVGWSVITDDYKVPSKKMKVLGNTDKHFIKKNLIGALLFDEGTTAEARRLKRTARRRYTRRKNRLRYLQEIFSEEIGKVDSSFFHRLDDSFLIPEDKRGSKYPIFATLAEEKKYHKQFPTIYHLRKQLADSKEKTDLRLIYLALAHMIKYRGHFLYEEAFDIKNNDIQKIFNEFISIYNNTFEGNSLSGQNVQVEAIFTDKISKSAKRERVLKLFPDEKSTGLFSEFLKLIVGNQADFKKHFDLEEKAPLQFSRDTYDEDLENLLGQIGDDFADLFLVAKKLYDAILLSGILTVTNPSTKAPLSASMIERYENHQKDLASLKQFIKNNLPEKYDEVFSDQSEDGYAGYIDGKTTQETFYKYIKNLLSKFEGADYFLDKIEREDFLRKQRTFDNGSIPHQIHLQEMNAILRRQGEHYPFLKENKEKIEKILTFRIPYYVGPLARGNRDFAWLTRNSDQAIRPWNFEEIVDKASSAEDFINKMTNYDLYLPEEKVLPKHSLLYETFAVYNELTKVKFIAEGLRDYQFLDSGQKKQIVTQLFKEKRKVTEKDIIQFLHNVDGYDGIELKGIEKQFNASLSTYHDLLKIIKDKAFMDDAKNEAILENIVHTLTIFEDREMIKQRLAQYDSLFDEKVIKALTRRHYTGWGKLSAKLINGISDKQTGNTILDYLIDDGEINRNFMQLINDDGLSFKEIIQKAQVVGKTNDVKQVVQELPGSPAIKKGILQSIKIVDELVKVMGHAPESIVIEMARENQTTARGKKNSQQRYKRIEDSLKILASGLNSKILKEHPTDNIQLQNDRLFLYYLQNGKDMYTGEALDINQLSSCDIDHIIPQAFIKDDSLDNRVLTSSKDNRGKSDNVPSLEVVDKMKVFWQQLLDSKLISYRKFNNLTKAERGGLNELDKVGFIKRQLVETRQITKHVAQILDARFNKEVTEKDKKNRTVKIITLKSNLVSNFRKEFELYKVREINDYHHAHDAYLNAVVAKAILKKYPKLEPEFVYGDYQKYDLKRYISRSKDPKEIEKATEKYFFYSNLLNFFKEEVHYADGTIVKRENIEYSKDTGEIAWNKEKDFATIKKVLSLPQVNIVKKREVQTGGFSKESILPKGNSDKLIPRKTKDILWDTTKYGGFDSPVIAYSILLIADIEKGKAKKLKTVKTLVGITIMEKDAFEKNPIAFLENKGYHNVCKENILCLPKYSLFELENGRRRLLASAKELQKCNEIVLPVYLTTLLYHSKNVHKLDEPGHLEYIQKHRNEFKDLLNLVSEFSQKYVLADANLEKIKNLYADNEQADIEILANSFINLLTFTALGAPAAFKFFGKDVDRKRYTTVSEILNATLIHQSITGLYETRIDLSKLGED

SEQ ID NO: 674 - protein, 1345 aa, Streptococcus mutans M230
MKKPYSIGLDIGTNSVGWAVVTDDYKVPAKKMKVLGNTDKSHIKKNLLGALLFDSGNTAEDRRLKRTARRRYTRRRNRILYLQEIFSEEMGKVDDSFFHRLEDSFLVTEDKRGERHPIFGNLEEEVKYHENFPTIYHLRQYLADNPEKVDLRLVYLALAHIIKFRGHFLIEGKFDTRNNDVQRLFQEFLAVYDNTFENSSLQEQNVQVEEILTDKISKSAKKDRVLKLFPNEKSNGRFAEFLKLIVGNQADFKKHFELEEKAPLQFSKDTYEEELEVLLAQIGDNYAELFLSAKKLYDSILLSGILTVTDVSTKAPLSASMIQRYNEHQMDLAQLKQFIRQKLSDKYNEVFSDVSKDGYAGYIDGKTNQEAFYKYLKGLLNKIEGSGYFLDKIEREDFLRKQRTFDNGSIPHQIHLQEMRAIIRRQAEFYPFLADNQDRIEKILTFRIPYYVGPLARGKSDFAWLSRKSADKITPWNFDEIVDKESSAEAFINRMTNYDLYLPNQKVLPKHSLLYEKFTVYNELTKVKYKTEQGKTAFFDANMKQEIFDGVFKVYRKVTKDKLMDFLEKEFDEFRIVDLTGLDKENKVFNASYGTYHDLCKILDKDFLDNSKNEKILEDIVLTLTLFEDREMIRKRLENYSDLLTKEQVKKLERRHYTGWGRLSAELIHGIRNKESRKTILDYLIDDGNSNRNFMQLINDDALSFKEEIAKAQVIGETDNLNQVVSDIAGSPAIKKGILQSLKIVDELVKIMGHQPENIVVEMARENQFTNQGRQNSQQRLKGLTDSIKEFGSQILKEHPVENSQLQNDRLFLYYLQNGRDMYTGEELDIDYLSQYDIDHIIPQAFIKDNSIDNRVLTSSKENRGKSDDVPSEDVVRKMKSYWSKLLSAKLITQRKFDNLTKAERGGLTDDDKAGFIKRQLVETRQITKHVARILDERFYTETDENNKKIRQVKIVTLKSNLVSNFRKEFELYKVREINDYHHAHDAYLNAVIGKALLGVYPQLEPEFVYGDYPHFHGHKENKATAKKFFYSNIMNFFKKDDVRTDKNGEIIWKKDEHISNIKKVLSYPQVNIVKKVEEQTGGFSKESILPKGNSDKLIPRKTKKFYWDTKKYGGFDSPIVAYSILVIADIEKGKSKKLKTVKALVGVTIMEKMTFERDPVAFLERKGYRNVQEENIIKLPKYSLFKLENGRKRLLASARELQKGNEIVLPNHLGTLLYHAKNIHKVDEPKHLDYVDKHKDEFKELLDVVSNFSKKYTLAEGNLEKIKELYAQNNGEDLKELASSFINLLTFTAIGAPATFKFFDKNIDRKRYTSTTEILNATLIHQSITGLYETRIDLSKLGGD

SEQ ID NO: 675 - protein, 1367 aa, Streptococcus pyogenes MGAS15252; identical to SEQ ID NO: 588

SEQ ID NO: 676 - protein, 1350 aa, Streptococcus mutans NFSM1
MKKPYSIGLDIGTNSVGWAVVTDDYKVPAKKMTVLGNTDKSHIKKNLLGALLFDSGNTAADRRLKRTARRRYTRRRNRILYLQEIFAEEMSKVDDSFFHRLEDSFLVTEDKRGERHPIFGNLEEEVKYHENFPTIYHLRQYLADNPEKVDLRLVYLALAHIIKFRGHFLIEGKFDTRNNDVQRLFQEFLAVYDNTFENSSLQEQNVQVEEILTDKISKSAKKDRVLKLFPNEKSNGRFAEFLKLIVGNQADFKKHFELEEKTPLQFSKDTYEEELEVLLAQIGDNYAELFLSAKKLYDSILLSGILTVTDVSTKAPLSASMIQRYNEHQMDLAQLKQFIRQKLSDKYNEVFSDVSKDGYAGYIDGKTNQEAFYKYLKGLLNKIEGSGYFLDKIEREDFLRKQRTFDNGSIPHQIHLQEMRAIIRRQAEFYPFLADNQDRIEKILTFRIPYYVGPLARGKSDFAWLSRKSADKITPWNFDEIVDKESSAEAFINRMTNYDLYLPNQKVLPKHSLLYEKFTVYNELTKVKYKTEQGKTAFFDANMKQEIFDGVFKVYRKVTKDKLMDFLEKEFDEFRIVDLTGLDKENKAFNASYGTYHDLRKILDKDFLDNSKNEKILEDIVLTLTLFEDREMIRKRLENYSDLLTKEQVKKLERRHYTGWGRLSAELIHGIRNKESRKTILDYLIDDGNSNRNFMQLINDDALSFKEEIAKAQVIGETDNLNQVVSDIAGSPAIKKGILQSLKIVDELVKIMGHQPENIVVEMARENQFTNQGRRNSQQRLKGLTDSIKEFGSQILKEHPVENSQLQNDRLFLYYLQNGRDMYTGEELDIDYLSQYDIDHIIPQAFIKDNSIDNRVLTSSKENRGKSDDVPSEDVVNRMRPFWNKLLSSGLISQRKYNNLTKKELTPDDKAGFIKRQLVETRQITKHVARMLDERFNKEFDDNNKRIRRVKIVTLKSNLVSSFRKEFELYKVREINDYHHAHDAYLNAVVVKALLVKYPKLEPEFVYGEYPKYNSYRERKTATQKMFFYSNIMNMFKSKVKLADDQIVERPMIEVNDETGEIAWDKTKHITTVKKVLSYPQVNIVKKVEEQTIGQNGGLFDDNPKSPLEVIPSKLVPLKKALNPEKYGGYQKPTTAYPILLIVDTKQLIPISVMDKKRFEQNPVKFLKDKGYQQIEKNNFVKLPKYTLVDIGNGIKRLWASSKEVHKGNQLVVSKKSQDLLYHAHHLDNDYSNEYVKNHYQQFDILFNEITSFSKKCKLGKEHIQKIEEAYSKERDSASIEELADGFIKLLGFTQLGATSPFSFLGIKLNQKQYTGKKDYLLPCMEATLIHQSITGLYETRIDLSKLGGD

SEQ ID NO: 677 - protein, 1388 aa, Streptococcus thermophilus (strain ND03)
MTKPYSIGLDIGTNSVGWAVITDNYKVPSKKMKVLGNTSKKYIKKNLLGVLLFDSGITAEGRRLKRTARRRYTRRRNRILYLQEIFSTEMATLDDAFFQRLDDSFLVPDDKRDSKYPIFGNLVEEKAYHDEFPTIYHLRKYLADSTKKADLRLVYLALAHMIKYRGHFLIEGEFNSKNNDIQKNFQDFLDTYNAIFESDLSLENSKQLEEIVKDKISKLEKKDRILKLFPGEKNSGIFSEFLKLIVGNQADFRKCFNLDEKASLHFSKESYDEDLETLLGYIGDDYSDVFLKAKKLYDAILLSGFLTVTDNETEAPLSSAMIKRYNEHKEDLALLKEYIRNISLKTYNEVFKDDTKNGYAGYIDGKTNQEDFYVYLKNLLAEFEGADYFLEKIDREDFLRKQRTFDNGSIPYQIHLQEMRAILDKQAKFYPFLAKNKERIEKILTFRIPYYVGPLARGNSDFAWSIRKRNEKITPWNFEDVIDKESSAEAFINRMTSFDLYLPEEKVLPKHSLLYETFNVYNELTKVRFIAESMRDYQFLDSKQKKDIVRLYFKDKRKVTDKDIIEYLHAIYGYDGIELKGIEKQFNSSLSTYHDLLNIINDKEFLDDSSNEAIIEEIIHTLTIFEDREMIKQRLSKFENIFDKSVLKKLSRRHYTGWGKLSAKLINGIRDEKSGNTILDYLIDDGISNRNFMQLIHDDALSFKKKIQKAQIIGDEDKGNIKEVVKSLPGSPAIKKGILQSIKIVDELVKVMGGRKPESIVVEMARENQYTNQGKSNSQQRLKRLEKSLKELGSKILKENIPAKLSKIDNNALQNDRLYLYYLQNGKDMYTGDDLDIDRLSNYDIDHIIPQAFLKDNSIDNKVLVSSASNRGKSDDFPSLEVVKKRKTFWYQLLKSKLISQRKFDNLTKAERGGLLPEDKAGFIQRQLVETRQITKHVARLLDEKFNNKKDENNRAVRTVKIITLKSTLVSQFRKDFELYKVCEINDFHHAHDAYLNAVIASALLKKYPKLEPEFVYGDYPKYNSFRERKSATEKVYFYSNIMNIFKKSISLADGRVIERPLIEVNEETGESVWNKESDLATVRRVLSYPQVNVVKKVEEQNHGLDRGKPKGLFNANLSSKPKPNSNENLVGAKEYLDPKKYGGYAGISNSFAVLVKGTIEKGAKKKITNVLEFQGISILDRINYRKDKLNFLLEKGYKDIELIIELPKYSLFELSDGSRRMLASILSTNNKRGEIHKGNQIFLSQKFVKLLYHAKRISNTINENHRKYVENHKKEFEELFYYILEFNENYVGAKKNGKLLNSAFQSWQNHSIDELCSSFIGPTGSERKGLFELTSRGSAADFEFLGVKIPRYRDYTPSSLLKDATLIHQSVTGLYETRIDLAKLGEG

SEQ ID NO: 678 - protein, 1368 aa, Streptococcus pyogenes serotype M12 (strain MGAS2096); identical to SEQ ID NO: 646

SEQ ID NO: 679 - protein, 1345 aa, Streptococcus mutans serotype c (strain NN2025)
MKKPYSIGLDIGTNSVGWAVVTDDYKVPAKKMKVLGNTDKSHIKKNLLGALLFDSGNTAADRRLKRTARRRYTRRRNRILYLQEIFAEEMSKVDDSFFHRLEDSFLVTEDKRGERHPIFGNLEEEVKYHENFPTIYHLRQYLADNPEKVDLRLVYLALAHIIKFRGHFLIEGKFDTRNNDVQRLFQEFLAVYDNTFENSSLQEQNVQVEEILTDKISKSAKKDRVLKLFPNEKSNGRFAEFLKLIVGNQADFKKHFELEEKAPLQFSKDTYEEELEVLLAQIGDNYAELFLSAKKLYDSILLSGILTVTDVSTKAPLSASMIQRYNEHQMDLAQLKQFIRQKLSDKYNEVFSDVSKDGYAGYIDGKTNQEAFYKYLKGLLNKIEGSGYFLDKIEREDFLRKQRTFDNGSIPHQIHLQEMRAIIRRQAEFYPFLADNQDRIEKILTFRIPYYVGPLARGKSDFAWLSRKSADKITPWNFDEIVDKESSAEAFINRMTNYDLYLPNQKVLPKHSLLYEKFTVYNELTKVKYKTEQGKTAFFDANMKQEIFDGVFKVYRKVTKDKLMDFLEKEFDEFRIVDLTGLDKENKAFNASYGTYHDLRKILDKDFLDNSKNEKILEDIVLTLTLFEDREMIRKRLENYSDLLTKEQVKKLERRHYTGWGRLSAELIHGIRNKESRKTILDYLIDDGNSNRNFMQLINDDALSFKEEIAKAQVIGETDNLNQVVSDIAGSPAIKKGILQSLKIVDELVKIMGHQPENIVVEMARENQFTNQGRRNSQQRLKGLTDSIKEFGSQILKEHPVKHSQLQNDRLFLYYLQNGRDMYTGEELDIDYLSQYDIDHIIPQAFIKDNSIDNRVLTSSKENRGKSDDVPSKNVVRKMKSYWSKLLSAKLITQRKFDNLTKAERGGLTDDDKAGFIKRQLVETRQITKHVARILDERFHTETDENNKKIRQVKIVTLKSNLVSNFRKEFELYKVREINDYHHAHDAYLNAVIGKALLGVYPQLEPEFVYGDYPHFHGHKENKATAKKFFYSNIMNFFKKDDVRTDKNGEIIWKKDEHISNIKKVLSYPQVNIVKKVEEQTGGFSKESILPKGNSDKLIPRKTKKFYWDTKKYGGFDSPIVAYSILVIADIEKGKSKKLKTVKALVGVTIMEKMTFERDPVAFLERKGYRNVQEENIIKLPKYSLFKLENGRKRLLASARELQKGNEIVLPNHLGTLLYHAKNIHKVDEPKHLDYVDKHKDEFKELLDVVSNFSKKYTLAEGNLEKIKELYAQNNGEDLKELASSFINLLTFTAIGAPATFKFFDKNIDRKRYTSTTEILNATLIHQSITGLYETRIDLSKLGGD

SEQ ID NO: 680 - protein, 1371 aa, Streptococcus dysgalactiae subsp. equisimilis (strain GGS_124)
MDKKYSIGLDIGTNSVGWAVITDDYKVPSKKFKVLGNTDRHSIKKNLIGALLFDSGETAEATRLKRTARRRYTRRKNRIRYLQEIFSSEMSKVDDSFFHRLEESFLVEEDKKHERHPIFGNIVDEVAYHEKYPTIYHLRKKLADSTDKADLRLIYLALAHMIKFRGHFLIEGDLNPDNSDMDKLFIQLVQTYNQLFEENPINASRVDAKAILSARLSKSRRLENLIAQLPGEKRNGLFGNLIALSLGLTPNFKSNFDLAEDAKLQLSKDTYDDDLDNLLAQIGDQYADLFLAAKNLSDAILLSDILRVNSEITKAPLSASMIKRYDEHHQDLTLLKALVRQQLPEKYKEIFFDQSKNGYAGYIDGGASQEEFYKFIKPILEKMDGTEELLAKLNREDLLRKQRTFDNGSIPHQIHLGELHAILRRQEDFYPFLKDNREKIEKILTFRIPYYVGPLARGNSRFAWMTRKSEETITPWNFEEVVDKGASAQSFIERMTNFDKNLPNEKVLPKHSLLYEYFTVYNELTKVKYVTEGMRKPEFLSGKQKEAIVDLLFKTNRKVTVKQLKEDYFKKIECFDSVEISGVEDRFNASLGTYHDLLKIIKDKDFLDNEENEDILEDIVLTLTLFEDKEMIEERLKKYANLFDDKVMKQLKRRHYTGWGRLSRKLINGIRDKQSGKTILDFLKSDGFANRNFMQLINDDSLTFKEAIQKAQVSGQGHSLHEQIANLAGSPAIKKGILQSVKVVDELVKVMGHKPENIVIEMARENQTTQKGQKNSRERMKRIEEGIKELGSQILKEHPVENTQLQNEKLYLYYLQNGRDMYVDQELDINRLSDYDVDHIVPQSFIKDDSIDNKILTRSDKNRGKSDNVPSEEVVKKMKNYWRQLLNAKLITQRKFDNLTKAERGGLSELDKAGFIKRQLVETRQITKHVAQILDSRMNTKYDENDKLIREVKVITLKSKLVSDFRKDFQFYKVREINNYHHAHDAYLNAVVGTALIKKYTKLESEFVYGDYKVYDVRKMIAKSEQEIGKATAKRFFYSNIMNFFKTEITLANGEIRKRPLIETNEETGEIVWDKGRDFATVRKVLSMPQVNIVKKTEVQTGALTNESIYARGSFDKLISRKHRFESSKYGGFGSPTVTYSVLVVAKSKVQDGKVKKIKTGKELIGMTLLDKLVFEKNPLKFIEDKGYGNVQIDKCIKLPKYSLFEFENGTRRMLASVMANNNSRGDLQKANEMFLPAKLVTLLYHAHKIESSKELEHEAYILDHYNDLYQLLSYIERFASLYVDVEKNISKVKELFSNIESYSISEICSSVINLLTLTASGAPADFKFLGTTIPRKRYGSPQSILSSTLIHQSITGLYETRIDLSQLGGD

SEQ ID NO: 681 - protein, 1370 aa, Streptococcus agalactiae serotype V (strain ATCC BAA-611 / 2603 V/R); identical to SEQ ID NO: 575

SEQ ID NO: 682 - protein, 1371 aa, Streptococcus gallolyticus (strain ATCC 43143 / F-1867)
MTEKNYSIGLDIGTNSVGWAVITDDYKVPAKKMKVLGNTDKKYIKKNLLGALLFDNGETAEATRLKRTARRRYTRRKNRLRYLQEIFAEEMAKVDESFFYRLDESFLTTDDKDFERHPIFGNKADEIKYHQEFPTIYHLRKHLADSHEKADLRLIYLALAHMIKFRGHFLIEGELNAENTDVQKLFEAFVEVYDRTFDDSNLSEITVDASSILTEKFSKSRRLENLIKHYPTEKKNTLFGNLVALALGLQPNFKTSFKLSEDAKLQFSKDTYEEDLEELIGKIGDEYADLFTSAKNLYDAILLSGILTVADNTTKAPLSASMIKRYNEHQVDLKKLKEFIKNNASDKYDEIFNDKDKNGYAGYIENGVKQDEFYKYLKTTLSKIDGSDYFLDKIEREDFLRKQRTFDNGSIPHQIHLQEMHAILRRQGEHYAFLKENQAKIEKILTFRIPYYVGPLARKNSRFAWAEYHSDEKITPWNFDEIIDKEKSAEKFITRMTLNDLYLPEEKVLPKHSLVYETYTVYNELTKVKYVNEQGKSNFFDANMKQEIFEHVFKENRKVTKDKFLNYLNKEFPEYRIQDLIGLDKENKSFNASLGTYHDLKKILDKSFLDDKTNETIIEDIIQTLTLFEDRDMIRQRLQKYSDIFTPQQLKKLERRHYTGWGRLSYKLINGIRNKENGKSILDYLIDDGYANRNFMQLISDDTLPFKQIIKDAQIIGDIDDVTSVVRELPGSPAIKKGILQSVKIVDELVKVMGHNPDNIVIEMARENQTTNRGRNQSQQRLKKLQDSLKELGSNILNEEKPSYIEGKVENNHLQDDRLFLYYIQNGKDMYTGDELDIDHLSDYDIDHIIPQAFIKDDSIDNRVLTSSAKNRGKSDDVPSLDIVHDRKADWIRLYKSGLISKRKFDNLTKAERGGLTENDKAGFIKRQLVETRQITKHVAQILDSRFNTERDENDKVIRNVKVITLKSNLVSQFRKDFKFYKVREINDYHHAHDAYLNAVVGTALLKKYPKLAPEFVYGEYKKYDIRKFITSSGDKATAKYFFYSNLMNFFKRVIRYSNGKVVVRPVIECSKDTGEIAWNKQTDFEKVRRVLSYPQVNIVKKVETQTGGFSKESILPKGNSDKLIPRKTKKFRWDTPKYGGFDSPNIAYSVFVIADVEKGKAKKLKTVKELVGISIMERSSFEENPVVFLEKKGYQNVQEDNLIKLPKYSLFEFEGGRRRLLASASELQKGNEVVLSRHLVELLYHAHRVNSFNNSEHLKYVSEHKKEFGEVLSCVENFAKSYVDVEKNLGKIRAVADKIDTFSIEDISISFVNLLTLTALGAPADFNFLGEKIPRKRYTSTKECLNATLIHQSITGLYETRIDLSKLGEE

SEQ ID NO: 683 - protein, 1371 aa, Streptococcus gallolyticus (strain UCN34); identical to SEQ ID NO: 682

SEQ ID NO: 684 - protein, 1370 aa, Streptococcus agalactiae serotype Ia (strain GD201008-001); identical to SEQ ID NO: 575

SEQ ID NO: 685 - protein, 1377 aa, Streptococcus agalactiae serotype III (strain NEM316)
MNKPYSIGLDIGTNSVGWSIITDDYKVPAKKMRVLGNTDKEYIKKNLIGALLFDGGNTAADRRLKRTARRRYTRRRNRILYLQEIFAEEMSKVDDSFFHRLEDSFLVEEDKRGSKYPIFATMQEEKYYHEKFPTIYHLRKELADKKEKADLRLVYLALAHIIKFRGHFLIEDDRFDVRNTDIQKQYQAFLEIFDTTFENNHLLSQNVDVEAILTDKISKSAKKDRILAQYPNQKSTGIFAEFLKLIVGNQADFKKHFNLEDKTPLQFAKDSYDEDLENLLGQIGDEFADLFSVAKKLYDSVLLSGILTVTDLSTKAPLSASMIQRYDEHHEDLKHLKQFVKASLPENYREVFADSSKDGYAGYIEGKTNQEAFYKYLLKLLTKQEGSEYFLEKIKNEDFLRKQRTFDNGSIPHQVHLTELRAIIRRQSEYYPFLKENQDRIEKILTFRIPYYVGPLAREKSDFAWMTRKTDDSIRPWNFEDLVDKEKSAEAFIHRMTNNDLYLPEEKVLPKHSLIYEKFTVYNELTKVRFLAEGFKDFQFLNRKQKETIFNSLFKEKRKVTEKDIISFLNKVDGYEGIAIKGIEKQFNASLSTYHDLKKILGKDFLDNTDNELILEDIVQTLTLFEDREMIKKCLDIYKDFFTESQLKKLYRRHYTGWGRLSAKLINGIRNKENQKTILDYLIDDGSANRNFMQLINDDDLSFKPIIDKARTGSHSDNLKEVVGELAGSPAIKKGILQSLKIVDELVKVMGYEPEQIVVEMARENQTTAKGLSRSRQRLTTLRESLANLKSNILEEKKPKYVKDQVENHHLSDDRLFLYYLQNGRDMYTKKALDIDNLSQYDIDHIIPQAFIKDDSIDNRVLVSSAKNRGKSDDVPSIEIVKARKMFWKNLLDAKLMSQRKYDNLTKAERGGLTSDDKARFIQRQLVETRQITKHVARILDERFNNEVDNGKKICKVKIVTLKSNLVSNFRKEFGFYKIREVNDYHHAHDAYLNAVVAKAILTKYPQLEPEFVYGMYRQKKLSKIVHEDKEEKYSEATRKMFFYSNLMNMFKRVVRLADGSIVVRPVIETGRYMRKTAWDKKKHFATVRKVLSYPQNNIVKKTEIQTGGFSKESILAHGNSDKLIPRKTKDIYLDPKKYGGFDSPIVAYSVLVVADIKKGKAQKLKTVTELLGITIMERSRFEKNPSAFLESKGYLNIRDDKLMILPKYSLFELENGRRRLLASAGELQKGNELALPTQFMKFLYLASRYNESKGKPEEIEKKQEFVNQHVSYFDDILQLINDFSKRVILADANLEKINKLYQDNKENIPVDELANNIINLFTFTSLGAPAAFKFFDKIVDRKRYTSTKEVLNSTLIHQSITGLYETRIDLGKLGED

SEQ ID NO: 686 - protein, 1368 aa, Streptococcus pyogenes serotype M3 (strain SSI-1)
MDKKYSIGLDIGTNSVGWAVITDDYKVPSKKLKGLGNTDRHGIKKNLIGALLFDSGETAEATRLKRTARRRYTRRKNRICYLQEIFSNEMAKVDDSFFHRLEESFLVEEDKKHERHPIFGNIVDEVAYHEKYPTIYHLRKKLADSTDKVDLRLIYLALAHMIKFRGHFLIEGDLNPDNSDVDKLFIQLVQTYNQLFEENPINASRVDAKAILSARLSKSRRLENLIAQLPGEKKNGLFGNLIALSLGLTPNFKSNFDLAEDAKLQLSKDTYDDDLDNLLAQIGDQYADLFLAAKNLSDATLLSDILRVNSEITKAPLSASMIKRYDEHHQDLTLLKALVRQQLPEKYKEIFFDQSKNGYAGYIDGGASQEEFYKFIKPILEKMDGTEELLAKLNREDLLRKQRTFDNGSIPYQIHLGELHAILRRQEDFYPFLKDNREKIEKILTFRIPYYVGPLARGNSRFAWMTRKSEETITPWNFEEVVDKGASAQSFIERMTNFDKNLPNEKVLPKHSLLYEYFTVYNELTKVKYVTEGMRKPAFLSGEQKKAIVDLLFKTNRKVTVKQLKEDYFKKIECFDSVEISGVEDRFNASLGTYHDLLKIIKDKDFLDNEENEDILEDIVLTLTLFEDREMIEERLKTYAHLFDDKVMKQLKRRRYTGWGRLSRKLINGIRDKQSGKTILDFLKSDGFANRNFMQLIHDDSLTFKEDIQKAQVSGQGDSLHEHIANLAGSPAIKKGILQTVKVVDELVKVMGRHKPENIVIEMARENQTTQKGQKNSRERMKRIEEGIKELGSDILKEYPVENTQLQNEKLYLYYLQNGRDMYVDQELDINRLSDYDVDHIVPQSFLKDDSIDNKVLTRSDKNRGKSDNVPSEEVVKKMKNYWRQLLNAKLITQRKFDNLTKAERGGLSELDKVGFIKRQLVETRQITKHVAQILDSRMNTKYDENDKLIREVRVITLKSKLVSDFRKDFQFYKVREINNYHHAHDAYLNAVVGTALIKKYPKLESEFVYGDYKVYDVRKMIAKSEQEIGKATAKYFFYSNIMNFFKTEITLANGEIRKRPLIETNGETGEIVWDKGRDFATVRKVLSMPQVNIVKKTEVQTGGFSKESILPKRNSDKLIARKKDWDPKKYGGFDSPTVAYSVLVVAKVEKGKSKKLKSVKELLGITIMERSSFEKDPIDFLEAKGYKEVRKDLIIKLPKYSLFELENGRKRMLASAGELQKGNELALPSKYVNFLYLASHYEKLKGSPEDNEQKQLFVEQHKHYLDEIIEQISEFSKRVILADANLDKVLSAYNKHRDKPIREQAENIIHLFTLTNLGAPAAFKYFDTTIDRKRYTSTKEVLDATLIHQSITGLYETRIDLSQLGGD

SEQ ID NO: 687 - protein, 1345 aa, Streptococcus mutans serotype c (strain ATCC 700610 / UA159); identical to SEQ ID NO: 602

SEQ ID NO: 688 - protein, 1370 aa, Streptococcus gallolyticus (strain ATCC BAA-2069); identical to SEQ ID NO: 594

SEQ ID NO: 689 - protein, 1368 aa, Streptococcus pyogenes serotype M49 (strain NZ131)
MDKKYSIGLDIGTNSVGWAVITDDYKVPSKKFKVLGNTDRHSIKKNLIGALLFDSGETAEATRLKRTARRRYTRRKNRICYLQEIFSNEIAKVDDSFFHRLEESFLVEEDKKHERHPIFGNIVDEVAYHEKYPTIYHLRKKLADSTDKADLRLIYLALAHMIKFRGHFLIEGDLNPDNSDVDKLFIQLVQTYNQLFEENPINASRVDAKAILSARLSKSRRLENLIAQLPGEKRNGLFGNLIALSLGLTPNFKSNFDLAEDAKLQLSKDTYDDDLDNLLAQIGDQYADLFLAAKNLSDAILLSDILRVNTEITKAPLSASMIKRYDEHHQDLTLLKALVRQQLPEKYKEIFFDQSKNGYAGYIDGGASQEEFYKFIKPILEKMDGTEELLAKLNREDLLRKQRTFDNGSIPHQIHLGELHAILRRQEDFYPFLKDNREKIEKILTFRIPYYVGPLARGNSRFAWMTRKSEETITPWNFEEVVDKGASAQSFIERMTNFDKNLPNEKVLPKHSLLYEYFTVYNELTKVKYVTEGMRKPAFLSGEQKKAIVDLLFKTNRKVTVKQLKEDYFKKIECFDSVEISGVEDRFNASLGTYHDLLKIIKDKDFLDNEENEDILEDIVLTLTLFEDREMIEERLKTYAHLFDDKVMKQLKRRRYTGWGRLSRKLINGIRDKQSGKTILDFLKSDGFANRNFMQLIHDDSLTFKEDLQKAQVSGQGDSLHEHIANLAGSPAIKKGILQTVKVVDELVKVMGRHKPENIVIEMARENQTTQKGQKNSRERMKRIEEGIKELGSDILKEYPVETTQLQNEKLYLYYLQNGRDMYVDQELDINRLSDYDVDHIVPQSFLKDDSIDNKVLTRSDKNRGKSDNVPSEEVVKKMKNYWKQLLNAKLITQRKFDNLTKAERGGLSELDKAGFIKRQLVETRQITKHVAQILDSRMNTKYDENDKLIREVRVITLKSKLVSDFRKDFQFYKVREINNYHHAHDAYLNAVVGTALIKKYPKLESEFVYGDYKVYDIRKMIAKSEQEIGKATAKYFFYSNIMNFFKTEITLANGEIRKRPLIETNGETGEIVWDKGRDFATVRKVLSMPQVNIVKKTEVQTGGFSKESILPKRNSDKLIARKKDWDPKKYGGFDSPTVAYSVLVVAKVEKGKSKKLKSVKELVGITIMERSSFEKDPVDFLEAKGYKEVRKDLIIKLPKYSLFELENGRKRMLASAGELQKGNELALPSKYVNFLYLASHYEKLKGSPEDNEQKQLFVEQHKHYLDEIIEQISEFSKRVILADANLDKVLSAYNKHRDKPIREQAENIIHLFTLTNLGAPAAFKCFDTTIGRNRYKSIKEVLDATLIHQSITGLYETRIDLSQLGGD

SEQ ID NO: 690 - protein, 1370 aa, Streptococcus agalactiae serotype Ia (strain ATCC 27591 / A909 / CDC SS700); identical to SEQ ID NO: 575

SEQ ID NO: 691 - protein, 1371 aa, Streptococcus dysgalactiae subsp. equisimilis (strain ATCC 12394 / D166B)
MDKKYSIGLDIGTNSVGWAVITDDYKVPSKKFKVLGNTDRHSIKKNLIGALLFDSGETAEATRLKRTARRRYTRRKNRIRYLQEIFSSEMSKVDDSFFHRLEESFLVEEDKKHERHPIFGNIVDEVAYHEKYPTIYHLRKKLADSTDKADLRLIYLALAHMIKFRGHFLIEGDLNPDNSDVDKLFIQLVQTYNQLFEEKPINASGVDAKAILSARLSKSKRLENLIAQLPGEKKNGLFGNLIALSLGLTPNFKSNFDLAEDAKLQLSKDTYDDDLDNLLAQIGNQYADLFLAAKNLSDAILLSDILRVNSEITKAPLSASMIKRYDEHHQDLTLLKALVRQQLPEKYKEIFFDQSKNGYAGYIDGGASQEEFYKFIKPILEKMDGTEELLAKLNREDLLRKQRTFDNGSIPHQIHLGELHAILRRQEDFYPFLKDNREKIEKILTFRIPYYVGPLARGNSRFAWMTRKSEETITPWNFEEVVDKGASAQSFIERMTNFDKNLPNEKVLPKHSLLYEYFTVYNELTKVKYVTEGMRKPEFLSGKQKEAIVDLLFKTNRKVTVKQLKEDYFKKIECFDSVEISGVEDRFNASLGTYHDLLKIIKDKDFLDNEENEDILEDIVLTLTLFEDKEMIEERLKKYANLFDDKVMKQLKRRHYTGWGRLSRKLINGIRDKQSGKTILDFLKSDGFANRNFMQLINDDSLTFKEAIQKAQVSGQGHSLHEQIANLAGSPAIKKGILQSVKVVDELVKVMGHKPENIVIEMARENQTTQKGQKNSRERMKRIEEGIKELGSQILKEHPVENTQLQNEKLYLYYLQNGRDMYVDQELDINRLSDYDVDHIVPQSFIKDDSIDNKVLTRSDKNRGKSDNVPSEEVVKKMKNYWRQLLNAKLITQRKFDNLTKAERGGLSELDKAGFIKRQLVETRQITKHVAQILDSRMNTKYDENDKLIREVKVITLKSKLVSDFRKDFQFYKVREINNYHHAHDAYLNAVVGTALIKKYPKLESEFVYGDYKVYDVRKMIAKSEQEIGKATAKRFFYSNIMNFFKTEITLANGEIRKRPLIETNEETGEIVWDKGRDFATVRKVLSMPQVNIVKKTEVQTGALTNESIYARGSFDKLISRKHRFESSKYGGFGSPTVTYSVLVVAKSKVQDGKVKKIKTGKELIGITLLDKLVFEKNPLKFIEDKGYGNVQIDKCIKLPKYSLFEFENGTRRMLASVMANNNSRGDLQKANEMFLPAKLVTLLYHAHKIESSKELEHEAYILDHYNDLYQLLSYIERFASLYVDVEKNISKVKELFSNIESYSISEICSSVINLLTLTASGAPADFKFLGTTIPRKRYGSPQSILSSTLIHQSITGLYETRIDLSQLGGD

SEQ ID NO: 692 - protein, 1375 aa, Streptococcus infantarius (strain CJ18)
MEKSYSIGLDIGTNSVGWAVITDDYKVPAKKMKVLGNTDKKYIKKNLLGALLFDSGETAEVTRLKRTARRRYTRRKNRLRYLQEIFAKEMTKVDESFFQRLEESFLTDDDKTFDSHPIFGNKAEEDAYHQKFPTIYHLRKYLADSQEKADLRLVYLALAHMIKYRGHFLIEGELNAENTDVQKLFNVFVETYDKIVDESHLSEIEVDASSILTEKVSKSRRLENLIKQYPTEKKNTLFGNLIALALGLQPNFKTNFKLSEDAKLQFSKDTYEEDLEELLGKVGDDYADLFISAKNLYDAILLSGILTVDDNSTKAPLSASMIKRYVEHHEDLEKLKEFIKINKLKLYHDIFKDKTKNGYAGYIDNGVKQDEFYKYLKTILTKIDDSDYFLDKIERDDFLRKQRTFDNGSIPHQIHLQEMHSILRRQGDYYPFLKENQAKIEKILTFRIPYYVGPLARKDSRFAWANYHSDEPITPWNFDEVVDKEKSAEKFITRMTLNDLYLPEEKVLPKHSHVYETFTVYNELTKIKYVNEQGESFFFDANMKQEIFDHVFKENRKVTKAKLLSYLNNEFEEFRINDLIGLDKDSKSFNASLGTYHDLKKILDKSFLDDKTNGQIIEDIVLTLTLFEDRDMIHERLQKYSDFFTSQQLKKLERRHYTGWGRLSYKLINGIRNKENNKTILDFLIDDGHANRNFMQLINDESLSFKTIIQEAQVVGDVDDIEAVVHDLPGSPAIKKGILQSVKIVDELVKVMGDNPDNIVIEMARENQTTGYGRNKSNQRLKRLQDSLKEFGSDILSKKKPSYVDSKVENSHLQNDRLFLYYIQNGKDMYTGEELDIDRLSDYDIDHIIPQAFIKDNSIDNKVLTSSAKNRGKSDDVPSIEIVRNRRSYWYKLYKSGLISKRKFDNLTKAERGGLTEADKAGFIKRQLVETRQITKHVAQILDARFNTKRDENDKVIRDVKVITLKSNLVSQFRKEFKFYKVREINDYHHAHDAYLNAVVGTALLKKYPKLTPEFVYGEYKKYDVRKLIAKSSDDYSEMGKATAKYFFYSNLMNFFKTEVKYADGRVFERPDIETNADGEVVWNKQKDFDIVRKVLSYPQVNIVKKVEAQTGGFSKESILSKGDSDKLIPRKTKKVYWNTKKYGGFDSPTVAYSVLVVADIEKGKAKKLKTVKELVGISIMERSFFEENPVSFLEKKGYHNVQEDKLIKLPKYSLFEFEGGRRRLLASATELQKGNEVMLPAHLVELLYHAHRIDSFNSTEHLKYVSEHKKEFEKVLSCVENFSNLYVDVEKNLSKVRAAAESMTNFSLEEISASFINLLTLTALGAPADFNFLGEKIPRKRYTSTKECLSATLIHQSVTGLYETRIDLSKLGEE

SEQ ID NO: 693 - protein, 1368 aa, Streptococcus pyogenes serotype M1; identical to SEQ ID NO: 601

SEQ ID NO: 694 - protein, 1371 aa, Streptococcus pyogenes serotype M4 (strain MGAS10750)
MDKKYSIGLDIGTNSVGWAVITDDYKVPSKKFKVLGNTDRHSIKKNLIGALLFDSGETAEATRLKRTARRRYTRRKNRICYLQEIFSNEMAKVDDSFFHRLEESFLVEEDKKHERHPIFGNIVDEVAYHEKYPTIYHLRKKLADSTDKADLRLIYLALAHMIKFRGHFLIEGDLNPDNSDVDKLFIQLVQTYNQLFEENPINASRVDAKAILSARLSKSRRLENLIAQLPGEKKNGLFGNLIALSLGLTPNFKSNFDLAEDAKLQLSKDTYDDDLDNLLAQIGDQYADLFLAAKNLSDATLLSDILRVNSEITKAPLSASMIKRYDEHHQDLTLLKALVRQQLPEKYKEIFFDQSKNGYAGYIDGGASQEEFYKFIKPILEKMDGTEELLAKLNREDLLRKQRTFDNGSIPHQIHLGELHAILRRQEDFYPFLKDNREKIEKILTFRIPYYVGPLARGNSRFAWMTRKSEETITPWNFEEVVDKGASAQSFIERMTNFDKNLPNEKVLPKHSLLYEYFTVYNELTKVKYVTEGMRKPAFLSGEQKKAIVDLLFKTNRKVTVKQLKEDYFKKIECFDSVEISGVEDRFNASLGTYHDLLKIIKDKDFLDNEENEDILEDIVLTLTLFEDKEMIEERLKTYAHLFDDKVMKQLKRRHYTGWGRLSRKLINGIRDKQSGKTILDFLKSDGFANRNFIQLIHDDSLTFKEAIQKAQVSGQGHSLHEQIANLAGSPAIKKGILQSVKVVDELVKVMGHKPENIVIEMARENQTTQKGQKNSRERMKRIEEGIKELGSQILKEHPVENTQLQNEKLYLYYLQNGRDMYVDQELDINRLSDYDVDHIVPQSFIKDDSIDNKVLTRSDKNRGKSDDVPSEEVVKKMKNYWRQLLNAKLITQRKFDNLTKAERGGLSELDKAGFIKRQLVETRQITKHVAQILDSRMNTKYDENDKLIREVKVITLKSKLVSDFRKDFQFYKVREINNYHHAHDAYLNAVVGTALIKKYPKLESEFVYGDYKVYDVRKMIAKSEQEIGKATAKRFFYSNIMNFFKTEITLANGEIRKRPLIETNEETGEIVWDKGRDFATVRKVLSMPQVNIVKKTEVQTGALTNESIYARGSFDKLISRKHRFESSKYGGFGSPTVTYSVLVVAKSKVQDGKVKKIKTGKELIGITLLDKLVFEKNPLKFIEDKGYGNVQIDKCIKLPKYSLFEFENGTRRMLASVMANNNSRGDLQKANEMFLPAKLVTLLYHAHKIESSKELEHEAYILDHYNDLYQLLSYIERFASLYVDVEKNISKVKELFSNIESYSISEICSSVINLLTLTASGAPADFKFLGTTIPRKRYGSPQSILSSTLIHQSITGLYETRIDLSQLGSD

SEQ ID NO: 695 - protein, 1368 aa, Streptococcus pyogenes serotype M3 (strain ATCC BAA-595 / MGAS315); identical to SEQ ID NO: 686

SEQ ID NO: 696 - protein, 1368 aa, Streptococcus pyogenes serotype M12 (strain MGAS9429)
MDKKYSIGLDIGTNSVGWAVITDDYKVPSKKFKVLGNTDRHSIKKNLIGALLFDSGEIAEATRLKRTARRRYTRRKNRICYLQEIFSNEMAKVDDSFFHRLEESFLVEEDKKHERHPIFGNIVDEVAYHEKYPTIYHLRKKLVDSTDKADLRLIYLALAHMIKFRGHFLIEGDLNPDNSDVDKLFIQLVQTYNQLFEENPINASGVDAKAILSARLSKSRRLENLIAQLPGEKKNGLFGNLIALSLGLTPNFKSNFDLAEDAKLQLSKDTYDDDLDNLLAQIGDQYADLFLAAKNLSDAILLSDILRLNSEITKAPLSASMIKRYDEHHQDLTLLKALVRQQLPEKYKEIFFDQSKNGYAGYIDGGASQEEFYKFIKPILEKMDGTEELLAKLNREDLLRKQRTFDNGSIPHQIHLGELHAILRRQEDFYPFLKDNREKIEKILTFRIPYYVGPLARGNSRFAWMTRKSEETITPWNFEEVVDKGASAQSFIERMTNFDKNLPNEKVLPKHSLLYEYFTVYNELTKVKYVTEGMRKPAFLSGEQKKAIVDLLFKTNRKVTVKQLKEDYFKKIECFDSVEISGVEDRFNASLGTYHDLLKIIKDKDFLDNEENEDILEDIVLTLTLFEDREMIEERLKTYAHLFDDKVMKQLKRRRYTVWGRLSRKLINGIRDKQSGKTILDFLKSDGFANRNFMQLIHDDSLTFKEDIQKAQVSGQGDSLHEHIANLAGSPAIKKGILQTVKVVDELVKVMGRHKPENIVIEMARENQTTQKGQKNSRERMKRIEEGIKELGSQILKEHPVENTQLQNEKLYLYYLQNGRDMYVDQELDINRLSDYDVDHIVPQSFIKDDSIDNKVLTRSDKNRGKSDNVPSEEVVKKMKNYWRQLLNAKLITQRKFDNLTKAERGGLSELDKAGFIKRQLVETRQITKHVAQILDSRMNTKYDENDKLIREVKVITLKSKLVSDFRKDFQFYKVREINNYHHAHDAYLNAVVGTALIKKYPKLESEFVYGDYKVYDVRKMLAKSEQEIGKATAKYFFYSNIMNFFKTEITLANGEIRKRPLIETNGETGEIVWDKGRDFATVRKVLSMPQVNIVKKTEVQTGGFSKESILPKRNSDKLIARKKDWDPKKYGGFDSPTVAYSVLVVAKVEKGKSKKLKSVKELLGITIMERSSFEKNPIDFLEAKGYKEVRKDLIIKLPKYSLFELENGRKRMLASAGELQKGNELALPSKYVNFLYLASHYEKLKGSPEDNEQKQLFVEQHKHYLDEIIEQISEFSKRVILADANLDKVLSAYNKHRDKPIREQAENIIHLFTLTNLGAPTAFKYFDTTIDRKRYTSTKEVLDATFIHQSITGLYETRIDLSQLGGD

SEQ ID NO: 697 - protein, 1368 aa, Streptococcus pyogenes serotype M28 (strain MGAS6180)
MDKKYSIGLDIGTNSVGWAVITDDYKVPSKKFKVLGNTDRHSIKKNLIGALLFDSGETAEATRLKRTARRRYTRRKNRICYLQEIFSNEMAKVDDSFFHRLEESFLVEEDKKHERHPIFGNIVDEVAYHEKYPTIYHLRKKLVDSTDKADLRLIYLALAHMIKFRGHFLIEGDLNPDNSDVDKLFIQLVQTYNQLFEENPINASGVDAKAILSARLSKSRRLENLIAQLPGEKKNGLFGNLIALSLGLTPNFKSNFDLAEDAKLQLSKDTYDDDLDNLLAQIGDQYADLFLAAKNLSDAILLSDILRLNSEITKAPLSASMIKRYDEHHQDLTLLKALVRQQLPEKYKEIFFDQSKNGYAGYIDGGASQEEFYKFIKPILEKMDGTEELLAKLNREDLLRKQRTFDNGSIPHQIHLGELHAILRRQEDFYPFLKDNREKIEKILTFRIPYYVGPLARGNSRFAWMTRKSEETITPWNFEEVVDKGASAQSFIERMTNFDKNLPNEKVLPKHSLLYEYFTVYNELTKVKYVTEGMRKPAFLSGEQKKAIVDLLFKTNRKVTVKQLKEDYFKKIECFDSVEISGVEDRFNASLGTYHDLLKIIKDKDFLDNEENEDILEDIVLTLTLFEDREMIEERLKTYAHLFDDKVMKQLKRRRYTGWGRLSRKLINGIRDKQSGKTILDFLKSDGFANRNFMQLIHDDSLTFKEDIQKAQVSGQGDSLHEHIANLAGSPAIKKGILQTVKVVDELVKVMGRHKPENIVIEMARENQTTQKGQKNSRERMKRIEEGIKELGSQILKEHPVENTQLQNEKLYLYYLQNGRDMYVDQELDINRLSDYDVDHIVPQSFIKDDSIDNKVLTRSDKNRGKSNNVPSEEVVKKMKNYWRQLLNAKLITQRKFDNLTKAERGGLSELDKAGFIKRQLVETRQITKHVAQILDSRMNTKYDENDKLIREVKVITLKSKLVSDFRKDFQFYKVREINNYHHAHDAYLNAVVGTALIKKYPKLESEFVYGDYKVYDVRKMIAKSEQEIGKATAKYFFYSNIMNFFKTEITLANGEIRKRPLIETNGETGEIVWDKGRDFATVRKVLSMPQVNIVKKTEVQTGGFSKESILPKRNSDKLIARKKDWDPKKYGGFDSPTVAYSVLVVAKVEKGKSKKLKSVKELLGITIMERSSFEKNPIDFLEAKGYKEVRKDLIVKLPKYSLFELENGRKRMLASAGELQKGNELALPSKYVNFLYLASHYEKLKGSPEDNEQKQLFVEQHKHYLDEIIEQISEFSKRVILADANLDKVLSAYNKHRDKPIREQAENIIHLFTLTNLGAPAAFKYFDTTIDRKRYTSTKEVLDATFIHQSITGLYETRIDLSQLGGD

SEQ ID NO: 698 - protein, 1368 aa, Streptococcus pyogenes serotype M2 (strain MGAS10270)
MDKKYSIGLDIGTNSVGWAVITDDYKVPSKKFKVLGNTDRHSIKKNLIGALLFDSGETAEATRLKRTARRRYTRRKNRICYLQEIFSNEMAKVDDSFFHRLEESFLVEEDKKHERHPIFGNIVDEVAYHEKYPTIYHLRKKLVDSTDKADLRLIYLALAHMIKFRGHFLIEGDLNPDNSDVDKLFIQLVQTYNQLFEENPINASGVDAKAILSARLSKSRRLENLIAQLPGEKKNGLFGNLIALSLGLTPNFKSNFDLAEDAKLQLSKDTYDDDLDNLLAQIGDQYADLFLAAKNLSDAILLSDILRLNSEITKAPLSASMIKRYDEHHQDLTLLKALVRQQLPEKYKEIFFDQSKNGYAGYIDGGASQEEFYKFIKPILEKMDGTEELLAKLNREDLLRKQRTFDNGSIPHQIHLGELHAILRRQEDFYPFLKDNREKIEKILTFRIPYYVGPLARGNSRFAWMTRKSEETITPWNFEEVVDKGASAQSFIERMTNFDKNLPNEKVLPKHSLLYEYFTVYNELTKVKYVTEGMRKPAFLSGEQKKAIVDLLFKTNRKVTVKQLKEDYFKKIECFDSVEISGVEDRFNASLGTYHDLLKIIKDKDFLDNEENEDILEDIVLTLTLFEDREMIEERLKTYAHLFDDKVMKQLKRRRYTGWGRLSRKLINGIRDKQSGKTILDFLKSDGFANRNFMQLIHDDSLTFKEDIQKAQVSGQGDSLHEHIANLAGSPAIKKGILQTVKVVDELVKVMGRHKPENIVIEMARENQTTQKGQKNSRERMKRIEEGIKELGSQILKEHPVENTQLQNEKLYLYYLQNGRDMYVDQELDINRLSDYDVDHIVPQSFIKDDSIDNKVLTRSDKNRGKSDNVPSEEVVKKMKNYWRQLLNAKLITQRKFDNLTKAERGGLSELDKAGFIKRQLVETRQITKHVAQILDSRMNTKYDENDKLIREVKVITLKSKLVSDFRKDFQFYKVREINNYHHAHDAYLNAVVGTALIKKYPKLESEFVYGDYKVYDVRKMIAKSEQEIGKATAKYFFYSNIMNFFKTEITLANGEIRKRPLIETNGETGEIVWDKGRDFATVRKVLSMPQVNIVKKTEVQTGGFSKESILPKRNSDKLIARKKDWDPKKYGGFDSPTVAYSVLVVAKVEKGKSKKLKSVKELLGLTIMERSSFEKNPIDFLEAKGYKEVKKDLIIKLPKYSLFELENGRKRMLASAGELQKGNELALPSKYVNFLYLASHYEKLKGSPEDNEQKQLFVEQHKHYLDEIIEQISEFSKRVILADANLDKVLSAYNKHRDKPIREQAENIIHLFTLTNLGAPAAFKYFDTTIDRKRYTSTKEVLDATLIHQSITGLYETRIDLSQLGGD

SEQ ID NO: 699 - protein, 1398 aa, Veillonella atypica ACS-134-V-Col7a
METQTSNQLITSHLKDYPKQDYFVGLDIGTNSVGWAVTNTSYELLKFHSHKMWGSRLFEEGESAVTRRGFRSMRRRLERRKLRLKLLEELFADAMAQVDSTFFIRLHESKYHYEDKTTGHSSKHILFIDEDYTDQDYFTEYPTIYHLRKDLMENGTDDIRKLFLAVHHILKYRGNFLYEGATFNSNAFTFEDVLKQALVNITFNCFDTNSAISSISNILMESGKTKSDKAKAIERLVDTYTVFDEVNTPDKPQKEQVKEDKKTLKAFANLVLGLSANLIDLFGSVEDIDDDLKKLQIVGDTYDEKRDELAKVWGDEIHIIDDCKSVYDAIILMSIKEPGLTISQSKVKAFDKHKEDLVILKSLLKLDRNVYNEMFKSDKKGLHNYVHYIKQGRTEETSCSREDFYKYTKKIVEGLADSKDKEYILNEIELQTLLPLQRIKDNGVIPYQLHLEELKVILDKCGPKFPFLHTVSDGFSVTEKLIKMLEFRIPYYVGPLNTHHNIDNGGFSWAVRKQAGRVTPWNFEEKIDREKSAAAFIKNLTNKCTYLFGEDVLPKSSLLYSEFMLLNELNNVRIDGKALAQGVKQHLIDSIFKQDHKKMTKNRIELFLKDNNYITKKHKPEITGLDGEIKNDLTSYRDMVRILGNNFDVSMAEDIITDITIFGESKKMLRQTLRNKFGSQLNDETIKKLSKLRYRDWGRLSKKLLKGIDGCDKAGNGAPKTIIELMRNDSYNLMEILGDKFSFMECIEEENAKLAQGQVVNPHDIIDELALSPAVKRAVWQALRIVDEVAHIKKALPSRIFVEVARTNKSEKKKKDSRQKRLSDLYSAIKKDDVLQSGLQDKEFGALKSGLANYDDAALRSKKLYLYYTQMGRCAYTGNIIDLNQLNTDNYDIDHIYPRSLTKDDSFDNLVLCERTANAKKSDIYPIDNRIQTKQKPFWAFLKHQGLISERKYERLTRIAPLTADDLSGFIARQLVETNQSVKATTTLLRRLYPDIDVVFVKAENVSDFRHNNNFIKVRSLNHHHHAKDAYLNIVVGNVYHEKFTRNFRLFFKKNGANRTYNLAKMFNYDVICTNAQDGKAWDVKTSMNTVKKMMASNDVRVTRRLLEQSGALADATIYKASVAAKAKDGAYIGMKTKYSVFADVTKYGGMTKIKNAYSIIVQYTGKKGEEIKEIVPLPIYLINRNATDIELIDYVKSVIPKAKDISIKYRKLCINQLVKVNGFYYYLGGKTNDKIYIDNAIELVVPHDIATYIKLLDKYDLLRKENKTLKASSITTSIYNINTSTVVSLSNKVGIDVFDYFMSKLRTPLYMKMKGNKVDELSSTGRSKFIKMTLEEQSIYLLEVLNLLTNSKTTFDVKPLGITGSRSTIGVKIHNLDEFKIINESITGLYSNEVTIV

SEQ ID NO: 700 - protein, 1374 aa, Fusobacterium nucleatum subsp. vincentii ATCC 49256
MKKQKFSDYYLGFDIGTNSVGWCVTDLDYNVLRFNKKDMWGSRLFDEAKTAAERRVQRNSRRRLKRRKWRLNLLEEIFSDEIMKIDSNFFRRLKESSLWLEDKNSKEKFTLFNDDNYKDYDFYKQYPTIFHLRDELIKNPEKKDIRLIYLALHSIFKSRGHFLFEGQNLKEIKNFETLYNNLISFLEDNGINKSIDKDNIEKLEKIICDSGKGLKDKEKEFKGIFNSDKQLVAIFKLSVGSSVSLNDLFDTDEYKKEEVEKEKISFREQIYEDDKPIYYSILGEKIELLDIAKSFYDFMVLNNILSDSNYISEAKVKLYEEHKKDLKNLKYIIRKYNKENYDKLFKDKNENNYPAYIGLNKEKDKKEVVEKSRLKIDDLIKVIKGYLPKPERIEEKDKTIFNEILNKIELKTILPKQRISDNGTLPYQIHEVELEKILENQSKYYDFLNYEENGVSTKDKLLKTFKFRIPYYVGPLNSYHKDKGGNSWIVRKEEGKILPWNFEQKVDIEKSAEEFIKRMTNKCTYLNGEDVIPKDSFLYSEYIILNELNKVQVNDEFLNEENKRKIIDELFKENKKVSEKKFKEYLLVNQIANRTVELKGIKDSFNSNYVSYIKFKDIFGEKLNLDIYKEISEKSILWKCLYGDDKKIFEKKIKNEYGDILNKDEIKKINSFKFNTWGRLSEKLLTGIEFINLETGECYSSVMEALRRTNYNLMELLSSKFTLQESIDNENKEMNEVSYRDLIEESYVSPSLKRAILQTLKIYEEIKKITGRVPKKVFIEMARGGDESMKNKKIPARQEQLKKLYDSCGNDIANFSIDIKEMKNSLSSYDNNSLRQKKLYLYYLQFGKCMYTGREIDLDRLLQNNDTYDIDHIYPRSKVIKDDSFDNLVLVLKNENAEKSNEYPVKKEIQEKMKSFWRFLKEKNFISDEKYKRLTGKDDFELRGFMARQLVNVRQTTKEVGKILQQIEPEIKIVYSKAEIASSFREMFDFIKVRELNDTHHAKDAYLNIVAGNVYNTKFTEKPYRYLQEIKENYDVKKIYNYDIKNAWDKENSLEIVKKNMEKNTVNITRFIKEEKGELFNLNPIKKGETSNEIISIKPKLYDGKDNKLNEKYGYYTSLKAAYFIYVEHEKKNKKVKTFERITRIDSTLIKNEKNLIKYLVSQKKLLNPKIIKKIYKEQTLIIDSYPYTFTGVDSNKKVELKNKKQLYLEKKYEQILKNALKFVEDNQGETEENYKFIYLKKRNNNEKNETIDAVKERYNIEFNEMYDKFLEKLSSKDYKNYINNKLYTNFLNSKEKFKKLKLWEKSLILREFLKIFNKNTYGKYEIKDSQTKEKLFSFPEDTGRIRLGQSSLGNNKELLEESVTGLFVKKIKL

SEQ ID NO: 701 - protein, 1365 aa, Filifactor alocis ATCC 35896
MTKEYYLGLDVGTNSVGWAVTDSQYNLCKFKKKDMWGIRLFESANTAKDRRLQRGNRRRLERKKQRIDLLQEIFSPEICKIDPTFFIRLNESRLHLEDKSNDFKYPLFIEKDYSDIEYYKEFPTIFHLRKHLIESEEKQDIRLIYLALHNIIKTRGHFLIDGDLQSAKQLRPILDTFLLSLQEEQNLSVSLSENQKDEYEEILKNRSIAKSEKVKKLKNLFEISDELEKEEKKAQSAVIENFCKFIVGNKGDVCKFLRVSKEELEIDSFSFSEGKYEDDIVKNLEEKVPEKVYLFEQMKAMYDWNILVDILETEEYISFAKVKQYEKHKTNLRLLRDIILKYCTKDEYNRMFNDEKEAGSYTAYVGKLKKNNKKYWIEKKRNPEEFYKSLGKLLDKIEPLKEDLEVLTMMIEECKNHTLLPIQKNKDNGVIPHQVHEVELKKILENAKKYYSFLTETDKDGYSVVQKIESIFRFRIPYYVGPLSTRHQEKGSNVWMVRKPGREDRIYPWNMEEIIDFEKSNENFITRMTNKCTYLIGEDVLPKHSLLYSKYMVLNELNNVKVRGKKLPTSLKQKVFEDLFENKSKVTGKNLLEYLQIQDKDIQIDDLSGFDKDFKTSLKSYLDFKKQIFGEEIEKESIQNMIEDIIKWITIYGNDKEMLKRVIRANYSNQLTEEQMKKITGFQYSGWGNFSKMFLKGISGSDVSTGETFDIITAMWETDNNLMQILSKKFTFMDNVEDFNSGKVGKIDKITYDSTVKEMFLSPENKRAVWQTIQVAEEIKKVMGCEPKKIFIEMARGGEKVKKRTKSRKAQLLELYAACEEDCRELIKEIEDRDERDFNSMKLFLYYTQFGKCMYSGDDIDINELIRGNSKWDRDHIYPQSKIKDDSIDNLVLVNKTYNAKKSNELLSEDIQKKMHSFWLSLLNKKLITKSKYDRLTRKGDFTDEELSGFIARQLVETRQSTKAIADIFKQIYSSEVVYVKSSLVSDFRKKPLNYLKSRRVNDYHHAKDAYLNIVVGNVYNKKFTSNPIQWMKKNRDTNYSLNKVFEHDVVINGEVIWEKCTYHEDTNTYDGGTLDRIRKIVERDNILYTEYAYCEKGELFNATIQNKNGNSTVSLKKGLDVKKYGGYFSANTSYFSLIEFEDKKGDRARHIIGVPIYIANMLEHSPSAFLEYCEQKGYQNVRILVEKIKKNSLLIINGYPLRIRGENEVDTSFKRAIQLKLDQKNYELVRNIEKFLEKYVEKKGNYPIDENRDHITHEKMNQLYEVLLSKMKKFNKKGMADPSDRIEKSKPKFIKLEDLIDKINVINKMLNLLRCDNDTKADLSLIELPKNAGSFVVKKNTIGKSKIILVNQSVTGLYENRREL

SEQ ID NO: 702 - protein, 1327 aa, Solobacterium moorei F0204
MEGQMKNNGNNLQQGNYYLGLDVGTSSVGWAVTDTDYNVLKFRGKSMWGARLFDEASTAEERRTHRGNRRRLARRKYRLLLLEQLFEKEIRKIDDNFFVRLHESNLWADDKSKPSKFLLFNDTNFTDKDYLKKYPTIYHLRSDLIHNSTEHDIRLVFLALHHLIKYRGHFIYDNSANGDVKTLDEAVSDFEEYLNENDIEFNIENKKEFINVLSDKHLTKKEKKISLKKLYGDITDSENINISVLIEMLSGSSISLSNLFKDIEFDGKQNLSLDSDIEETLNDVVDILGDNIDLLIHAKEVYDIAVLTSSLGKHKYLCDAKVELFEKNKKDLMILKKYIKKNHPEDYKKIFSSPTEKKNYAAYSQTNSKNVCSQEEFCLFIKPYIRDMVKSENEDEVRIAKEVEDKSFLTKLKGTNNSVVPYQIHERELNQILKNIVAYLPFMNDEQEDISVVDKIKLIFKFKIPYYVGPLNTKSTRSWVYRSDEKIYPWNFSNVIDLDKTAHEFMNRLIGRCTYTNDPVLPMDSLLYSKYNVLNEINPIKVNGKAIPVEVKQAIYTDLFENSKKKVTRKSIYIYLLKNGYIEKEDIVSGIDIEIKSKLKSHHDFTQIVQENKCTPEEIERIIKGILVYSDDKSMLRRWLKNNIKGLSENDVKYLAKLNYKEWGRLSKTLLTDIYTINPEDGEACSILDIMWNTNATLMEILSNEKYQFKQNIENYKAENYDEKQNLHEELDDMYISPAARRSIWQALRIVDEIVDIKKSAPKKIFIEMAREKKSAMKKKRTESRKDTLLELYKSCKSQADGFYDEELFEKLSNESNSRLRRDQLYLYYTQMGRSMYTGKRIDFDKLINDKNTYDIDHIYPRSKIKDDSITNRVLVEKDINGEKTDIYPISEDIRQKMQPFWKILKEKGLINEEKYKRLTRNYELTDEELSSFVARQLVETQQSTKALATLLKKEYPSAKIVYSKAGNVSEFRNRKDKELPKFREINDLHHAKDAYLNIVVGNVYDTKFTEKFFNNIRNENYSLKRVFDFSVPGAWDAKGSTFNTIKKYMAKNNPIIAFAPYEVKGELFDQQIVPKGKGQFPIKQGKDIEKYGGYNKLSSAFLFAVEYKGKKARERSLETVYIKDVELYLQDPIKYCESVLGLKEPQIIKPKILMGSLFSINNKKLVVTGRSGKQYVCHHIYQLSINDEDSQYLKNIAKYLQEEPDGNIERQNILNITSVNNIKLFDVLCTKFNSNTYEIILNSLKNDVNEGREKFSELDILEQCNILLQLLKAFKCNRESSNLEKLNNKKQAGVIVIPHLFTKCSVFKVIHQSITGLFEKEMDLLK

SEQ ID NO: 703 - protein, 1338 aa, Coprococcus catus GD-7
MKQEYFLGLDMGTGSLGWAVTDSTYQVMRKHGKALWGTRLFESASTAEERRMFRTARRRLDRRNWRIQVLQEIFSEEISKVDPGFFLRMKESKYYPEDKRDAEGNCPELPYALFVDDNYTDKNYHKDYPTIYHLRKMLMETTEIPDIRLVYLVLHHMMKHRGHFLLSGDISQIKEFKSTFEQLIQNIQDEELEWHISLDDAAIQFVEHVLKDRNLTRSTKKSRLIKQLNAKSACEKAILNLLSGGTVKLSDIFNNKELDESERPKVSFADSGYDDYIGIVEAELAEQYYIIASAKAVYDWSVLVEILGNSVSISEAKIKVYQKHQADLKTLKKIVRQYMTKEDYKRVFVDTEEKLNNYSAYIGMTKKNGKKVDLKSKQCTQADFYDFLKKNVIKVIDHKEITQEIESEIEKENFLPKQVTKDNGVIPYQVHDYELKKILDNLGTRMPFIKENAEKIQQLFEFRIPYYVGPLNRVDDGKDGKFTWSVRKSDARIYPWNFTEVIDVEASAEKFIRRMTNKCTYLVGEDVLPKDSLVYSKFMVLNELNNLRLNGEKISVELKQRIYEELFCKYRKVTRKKLERYLVIEGIAKKGVEITGIDGDFKASLTAYHDFKERLTDVQLSQRAKEAIVLNVVLFGDDKKLLKQRLSKMYPNLTTGQLKGICSLSYQGWGRLSKTFLEEITVPAPGTGEVWNIMTALWQTNDNLMQLLSRNYGFTNEVEEFNTLKKETDLSYKTVDELYVSPAVKRQIWQTLKVVKEIQKVMGNAPKRVFVEMAREKQEGKRSDSRKKQLVELYRACKNEERDWITELNAQSDQQLRSDKLFLYYIQKGRCMYSGETIQLDELWDNTKYDIDHIYPQSKTMDDSLNNRVLVKKNYNAIKSDTYPLSLDIQKKMMSFWKMLQQQGFITKEKYVRLVRSDELSADELAGFIERQIVETRQSTKAVATILKEALPDTEIVYVKAGNVSNFRQTYELLKVREMNDLHHAKDAYLNIVVGNAYFVKFTKNAAWFIRNNPGRSYNLKRMFEFDIERSGEIAWKAGNKGSIVTVKKVMQKNNILVTRKAYEVKGGLFDQQIMKKGKGQVPIKGNDERLADIEKYGGYNKAAGTYFMLVKSLDKKGKEIRTIEFVPLYLKNQIEINHESAIQYLAQERGLNSPEILLSKIKIDTLFKVDGFKMWLSGRTGNQLIFKGANQLILSHQEAAILKGVVKYVNRKNENKDAKLSERDGMTEEKLLQLYDTFLDKLSNTVYSIRLSAQIKTLTEKRAKFIGLSNEDQCIVLNEILHMFQCQSGSANLKLIGGPGSAGILVMNNNITACKQISVINQSPTGIYEKEIDLIKL

SEQ ID NO: 704 - protein, 1395 aa, Treponema denticola ATCC 35405
MKKEIKDYFLGLDVGTGSVGWAVTDTDYKLLKANRKDLWGMRCFETAETAEVRRLHRGARRRIERRKKRIKLLQELFSQEIAKTDEGFFQRMKESPFYAEDKTILQENTLFNDKDFADKTYHKAYPTINHLIKAWIENKVKPDPRLLYLACHNIIKKRGHFLFEGDFDSENQFDTSIQALFEYLREDMEVDIDADSQKVKEILKDSSLKNSEKQSRLNKILGLKPSDKQKKAITNLISGNKINFADLYDNPDLKDAEKNSISFSKDDFDALSDDLASILGDSFELLLKAKAVYNCSVLSKVIGDEQYLSFAKVKIYEKHKTDLTKLKNVIKKHFPKDYKKVFGYNKNEKNNNNYSGYVGVCKTKSKKLIINNSVNQEDFYKFLKTILSAKSEIKEVNDILTEIETGTFLPKQISKSNAEIPYQLRKMELEKILSNAEKHFSFLKQKDEKGLSHSEKIIMLLTFKIPYYIGPINDNHKKFFPDRCWVVKKEKSPSGKTTPWNFFDHIDKEKTAEAFITSRTNFCTYLVGESVLPKSSLLYSEYTVLNEINNLQIIIDGKNICDIKLKQKIYEDLFKKYKKITQKQISTFIKHEGICNKTDEVIILGIDKECTSSLKSYIELKNIFGKQVDEISTKNMLEEIIRWATIYDEGEGKTILKTKIKAEYGKYCSDEQIKKILNLKFSGWGRLSRKFLETVTSEMPGFSEPVNIITAMRETQNNLMELLSSEFTFTENIKKINSGFEDAEKQFSYDGLVKPLFLSPSVKKMLWQTLKLVKEISHITQAPPKKIFIEMAKGAELEPARTKTRLKILQDLYNNCKNDADAFSSEIKDLSGKIENEDNLRLRSDKLYLYYTQLGKCMYCGKPIEIGHVFDTSNYDIDHIYPQSKIKDDSISNRVLVCSSCNKNKEDKYPLKSEIQSKQRGFWNFLQRNNFISLEKLNRLTRATPISDDETAKFIARQLVETRQATKVAAKVLEKMFPETKIVYSKAETVSMFRNKFDIVKCREINDFHHAHDAYLNIVVGNVYNTKFTNNPWNFIKEKRDNPKIADTYNYYKVFDYDVKRNNITAWEKGKTIITVKDMLKRNTPIYTRQAACKKGELFNQTIMKKGLGQHPLKKEGPFSNISKYGGYNKVSAAYYTLIEYEEKGNKIRSLETIPLYLVKDIQKDQDVLKSYLTDLLGKKEFKILVPKIKINSLLKINGFPCHITGKTNDSFLLRPAVQFCCSNNEVLYFKKIIRFSEIRSQREKIGKTISPYEDLSFRSYIKENLWKKTKNDEIGEKEFYDLLQKKNLEIYDMLLTKHKDTIYKKRPNSATIDILVKGKEKFKSLIIENQFEVILEILKLFSATRNVSDLQHIGGSKYSGVAKIGNKISSLDNCILIYQSITGIFEKRIDLLKV

SEQ ID NO: 705 - protein, 1364 aa, Peptoniphilus duerdenii ATCC BAA-1640
MKNLKEYYIGLDIGTASVGWAVTDESYNIPKFNGKKMWGVRLFDDAKTAEERRTQRGSRRRLNRRKERINLLQDLFATEISKVDPNFFLRLDNSDLYREDKDEKLKSKYTLFNDKDFKDRDYHKKYPTIHHLIMDLIEDEGKKDIRLLYLACHYLLKNRGHFIFEGQKFDTKNSFDKSINDLKIHLRDEYNIDLEFNNEDLIEIITDTTLNKTNKKKELKNIVGDTKFLKAISAIMIGSSQKLVDLFEDGEFEETTVKSVDFSTTAFDDKYSEYEEALGDTISLLNILKSIYDSSILENLLKDADKSKDGNKYISKAFVKKFNKHGKDLKTLKRIIKKYLPSEYANIFRNKSINDNYVAYTKSNITSNKRTKASKFTKQEDFYKFIKKHLDTIKETKLNSSENEDLKLIDEMLTDIEFKTFIPKLKSSDNGVIPYQLKLMELKKILDNQSKYYDFLNESDEYGTVKDKVESIMEFRIPYYVGPLNPDSKYAWIKRENTKITPWNFKDIVDLDSSREEFIDRLIGRCTYLKEEKVLPKASLIYNEFMVLNELNNLKLNEFLITEEMKKAIFEELFKTKKKVTLKAVSNLLKKEFNLTGDILLSGTDGDFKQGLNSYIDFKNIIGDKVDRDDYRIKIEEIIKLIVLYEDDKTYLKKKIKSAYKNDFTDDEIKKIAALNYKDWGRLSKRFLTGIEGVDKTTGEKGSIIYFMREYNLNLMELMSGHYTFTEEVEKLNPVENRELCYEMVDELYLSPSVKRMLWQSLRVVDEIKRIIGKDPKKIFIEMARAKEAKNSRKESRKNKLLEFYKFGKKAFINEIGEERYNYLLNEINSEEESKFRWDNLYLYYTQLGRCMYSLEPIDLADLKSNNIYDQDHIYPKSKIYDDSLENRVLVKKNLNHEKGNQYPIPEKVLNKNAYGFWKILFDKGLIGQKKYTRLTRRTPFEERELAEFIERQIVETRQATKETANLLKNICQDSEIVYSKAENASRFRQEFDIIKCRTVNDLHHMHDAYLNIVVGNVYNTKFTKNPLNFIKDKDNVRSYNLENMFKYDVVRGSYTAWIADDSEGNVKAATIKKVKRELEGKNYRFTRMSYIGTGGLYDQNLMRKGKGQIPQKENTNKSNIEKYGGYNKASSAYFALIESDGKAGRERTLETIPIMVYNQEKYGNTEAVDKYLKDNLELQDPKILKDKIKINSLIKLDGFLYNIKGKTGDSLSIAGSVQLIVNKEEQKLIKKMDKFLVKKKDNKDIKVTSFDNIKEEELIKLYKTLSDKLNNGIYSNKRNNQAKNISEALDKFKEISIEEKIDVLNQIILLFQSYNNGCNLKSIGLSAKTGVVFIPKKLNYKECKLINQSITGLFENEVDLLNL

SEQ ID NO: 706 - protein, 1329 aa, Catenibacterium mitsuokai DSM 15897
IVDYCIGLDLGTGSVGWAVVDMNHRLMKRNGKHLWGSRLFSNAETAANRRASRSIRRRYNKRRERIRLLRAILQDMVLEKDPTFFIRLEHTSFLDEEDKAKYLGTDYKDNYNLFIDEDFNDYTYYHKYPTIYHLRKALCESTEKADPRLIYLALHHIVKYRGNFLYEGQKFNMDASNIEDKLSDIFTQFTSFNNIPYEDDEKKNLEILEILKKPLSKKAKVDEVMTLIAPEKDYKSAFKELVTGIAGNKMNVTKMILCEPIKQGDSEIKLKFSDSNYDDQFSEVEKDLGEYVEFVDALHNVYSWVELQTIMGATHTDNASISEAMVSRYNKHHDDLKLLKDCIKNNVPNKYFDMFRNDSEKSKGYYNYINRPSKAPVDEFYKYVKKCIEKVDTPEAKQILNDIELENFLLKQNSRTNGSVPYQMQLDEMIKIIDNQAEYYPILKEKREQLLSILTFRIPYYFGPLNETSEHAWIKRLEGKENQRILPWNYQDIVDVDATAEGFIKRMRSYCTYFPDEEVLPKNSLIVSKYEVYNELNKIRVDDKLLEVDVKNDIYNELFMKNKTVTEKKLKNWLVNNQCCSKDAEIKGFQKENQFSTSLTPWIDFTNIFGKIDQSNFDLIENIIYDLTVFEDKKIMKRRLKKKYALPDDKVKQILKLKYKDWSRLSKKLLDGIVADNRFGSSVTVLDVLEMSRLNLMEIINDKDLGYAQMIEEATSCPEDGKFTYEEVERLAGSPALKRGIWQSLQIVEEITKVMKCRPKYIYIEFERSEEAKERTESKIKKLENVYKDLDEQTKKEYKSVLEELKGFDNTKKISSDSLFLYFTQLGKCMYSGKKLDIDSLDKYQIDHIVPQSLVKDDSFDNRVLVVPSENQRKLDDLVVPFDIRDKMYRFWKLLFDHELISPKKFYSLIKTEYTERDEERFINRQLVETRQITKNVTQIIEDHYSTTKVAAIRANLSHEFRVKNHIYKNRDINDYHHAHDAYIVALIGGFMRDRYPNMHDSKAVYSEYMKMFRKNKNDQKRWKDGFVINSMNYPYEVDGKLIWNPDLINEIKKCFYYKDCYCTTKLDQKSGQLFNLTVLSNDAHADKGVTKAVVPVNKNRSDVHKYGGFSGLQYTIVAIEGQKKKGKKTELVKKISGVPLHLKAASINEKINYIEEKEGLSDVRIIKDNIPVNQMIEMDGGEYLLTSPTEYVNARQLVLNEKQCALIADIYNAIYKQDYDNLDDILMIQLYIELTNKMKVLYPAYRGIAEKFESMNENYVVISKEEKANIIKQMLIVMHRGPQNGNIVYDDFKISDRIGRLKTKNHNLNNIVFISQSPTGIYTKKYKL

SEQ ID NO: 707 - protein, 1345 aa, Streptococcus mutans UA159; identical to SEQ ID NO: 602

SEQ ID NO: 708 - protein, 1368 aa, Streptococcus pyogenes SF370 [sequence omitted]

SEQ ID NO: 709 - protein, 1334 aa, Listeria innocua Clip11262
MKKPYTIGLDIGTNSVGWAVLTDQYDLVKRKMKIAGDSEKKQIKKNFWGVRLFDEGQTAADRRMARTARRRIERRRNRISYLQGIFAEEMSKTDANFFCRLSDSFYVDNEKRNSRHPFFATIEEEVEYHKNYPTIYHLREELVNSSEKADLRLVYLALAHIIKYRGNFLIEGALDTQNTSVDGIYKQFIQTYNQVFASGIEDGSLKKLEDNKDVAKILVEKVTRKEKLERILKLYPGEKSAGMFAQFISLIVGSKGNFQKPFDLIEKSDIECAKDSYEEDLESLLALIGDEYAELFVAAKNAYSAVVLSSIITVAETETNAKLSASMIERFDTHEEDLGELKAFIKLHLPKHYEEIFSNTEKHGYAGYIDGKTKQADFYKYMKMTLENIEGADYFIAKIEKENFLRKQRTFDNGAIPHQLHLEELEAILHQQAKYYPFLKENYDKIKSLVTFRIPYFVGPLANGQSEFAWLTRKADGEIRPWNIEEKVDFGKSAVDFIEKMTNKDTYLPKENVLPKHSLCYQKYLVYNELTKVRYINDQGKTSYFSGQEKEQIFNDLFKQKRKVKKKDLELFLRNMSHVESPTIEGLEDSFNSSYSTYHDLLKVGIKQEILDNPVNTEMLENIVKILTVFEDKRMIKEQLQQFSDVLDGVVLKKLERRHYTGWGRLSAKLLMGIRDKQSHLTILDYLMNDDGLNRNLMQLINDSNLSFKSIIEKEQVTTADKDIQSIVADLAGSPAIKKGILQSLKIVDELVSVMGYPPQTIVVEMARENQTTGKGKNNSRPRYKSLEKAIKEFGSQILKEHPTDNQELRNNRLYLYYLQNGKDMYTGQDLDIHNLSNYDIDHIVPQSFITDNSIDNLVLTSSAGNREKGDDVPPLEIVRKRKVFWEKLYQGNLMSKRKFDYLTKAERGGLTEADKARFIHRQLVETRQITKNVANILHQRFNYEKDDHGNTMKQVRIVTLKSALVSQFRKQFQLYKVRDVNDYHHAHDAYLNGVVANTLLKVYPQLEPEFVYGDYHQFDWFKANKATAKKQFYTNIMLFFAQKDRIIDENGEILWDKKYLDTVKKVMSYRQMNIVKKTEIQKGEFSKATIKPKGNSSKLIPRKTNWDPMKYGGLDSPNMAYAVVIEYAKGKNKLVFEKKIIRVTIMERKAFEKDEKAFLEEQGYRQPKVLAKLPKYTLYECEEGRRRMLASANEAQKGNQQVLPNHLVTLLHHAANCEVSDGKSLDYIESNREMFAELLAHVSEFAKRYTLAEANLNKINQLFEQNKEGDIKAIAQSFVDLMAFNAMGAPASFKFFETTIERKRYNNLKELLNSTIIYQSITGLYESRKRLDD

SEQ ID NO: 710 - protein, 1388 aa, Streptococcus thermophilus LMD-9; identical to SEQ ID NO: 571

SEQ ID NO: 711 - protein, 1334 aa, Staphylococcus pseudintermedius
MGRKPYILSLDIGTGSVGYACMDKGFNVLKYHDKDALGVYLFDGALTAQERRQFRTSRRRKNRRIKRLGLLQELLAPLVQNPNFYQFQRQFAWKNDNMDFKNKSLSEVLSFLGYESKKYPTIYHLQEALLLKDEKFDPELIYMALYHLVKYRGHFLFDHLKIENLTNNDNMHDFVELIETYENLNNIKLNLDYEKTKVIYEILKDNEMTKNDRAKRVKNMEKKLEQFSIMLLGLKFNEGKLFNHADNAEELKGANQSHTFADNYEENLTPFLTVEQSEFIERANKIYLSLTLQDILKGKKSMAMSKVAAYDKFRNELKQVKDIVYKADSTRTQFKKIFVSSKKSLKQYDATPNDQTFSSLCLFDQYLIRPKKQYSLLIKELKKIIPQDSELYFEAENDTLLKVLNTTDNASIPMQINLYEAETILRNQQKYHAEITDEMIEKVLSLIQFRIPYYVGPLVNDHTASKFGWMERKSNESIKPWNFDEVVDRSKSATQFIRRMTNKCSYLINEDVLPKNSLLYQEMEVLNELNATQIRLQTDPKNRKYRMMPQIKLFAVEHIFKKYKTVSHSKFLEIMLNSNHRENFMNHGEKLSIFGTQDDKKFASKLSSYQDMTKIFGDIEGKRAQIEEIIQWITIFEDKKILVQKLKECYPELTSKQINQLKKLNYSGWGRLSEKLLTHAYQGHSIIELLRHSDENFMEILTNDVYGFQNFIKEENQVQSNKIQHQDIANLTTSPALKKGIWSTIKLVRELTSIFGEPEKIIMEFATEDQQKGKKQKSRKQLWDDNIKKNKLKSVDEYKYIIDVANKLNNEQLQQEKLWLYLSQNGKCMYSGQSIDLDALLSPNATKHYEVDHIFPRSFIKDDSIDNKVLVIKKMNQTKGDQVPLQFIQQPYERIAYWKSLNKAGLISDSKLHKLMKPEFTAMDKEGFIQRQLVETRQISVHVRDFLKEEYPNTKVIPMKAKMVSEFRKKFDIPKIRQMNDAHHAIDAYLNGVVYHGAQLAYPNVDLFDFNFKWEKVREKWKALGEFNTKQKSRELFFFKKLEKMEVSQGERLISKIKLDMNHFKINYSRKLANIPQQFYNQTAVSPKTAELKYESNKSNEVVYKGLTPYQTYVVAIKSVNKKGKEKMEYQMIDHYVFDFYKFQNGNEKELALYLAQRENKDEVLDAQIVYSLNKGDLLYINNHPCYFVSRKEVINAKQFELTVEQQLSLYNVMNNKETNVEKLLIEYDFIAEKVINEYHHYLNSKLKEKRVRTFFSESNQTHEDFIKALDELFKVVTASATRSDKIGSRKNSMTHRAFLGKGKDVKIAYTSISGLKTTKPKSLFKLAESRNEL

SEQ ID NO: 712 - protein, 1358 aa, Acidaminococcus intestini RyC-MR95
MGKMYYLGLDIGTNSVGYAVTDPSYHLLKFKGEPMWGAHVFAAGNQSAERRSFRTSRRRLDRRQQRVKLVQEIFAPVISPIDPRFFIRLHESALWRDDVAETDKHIFFNDPTYTDKEYYSDYPTIHHLIVDLMESSEKHDPRLVYLAVAWLVAHRGHFLNEVDKDNIGDVLSFDAFYPEFLAFLSDNGVSPWVCESKALQATLLSRNSVNDKYKALKSLIFGSQKPEDNFDANISEDGLIQLLAGKKVKVNKLFPQESNDASFTLNDKEDAIEEILGTLTPDECEWIAHIRRLFDWAIMKHALKDGRTISESKVKLYEQHHHDLTQLKYFVKTYLAKEYDDIFRNVDSETTKNYVAYSYHVKEVKGTLPKNKATQEEFCKYVLGKVKNIECSEADKVDFDEMIQRLTDNSFMPKQVSGENRVIPYQLYYYELKTILNKAASYLPFLTQCGKDAISNQDKLLSIMTFRIPYFVGPLRKDNSEHAWLERKAGKIYPWNFNDKVDLDKSEEAFIRRMTNTCTYYPGEDVLPLDSLIYEKFMILNEINNIRIDGYPISVDVKQQVFGLFEKKRRVTVKDIQNLLLSLGALDKHGKLTGIDTTIHSNYNTYHHFKSLMERGVLTRDDVERIVERMTYSDDTKRVRLWLNNNYGTLTADDVKHISRLRKHDFGRLSKMFLTGLKGVHKETGERASILDFMWNTNDNLMQLLSECYTFSDEITKLQEAYYAKAQLSLNDFLDSMYISNAVKRPIYRTLAVVNDIRKACGTAPKRIFIEMARDGESKKKRSVTRREQIKNLYRSIRKDFQQEVDFLEKILENKSDGQLQSDALYLYFAQLGRDMYTGDPIKLEHIKDQSFYNIDHIYPQSMVKDDSLDNKVLVQSEINGEKSSRYPLDAAIRNKMKPLWDAYYNHGLISLKKYQRLTRSTPFTDDEKWDFINRQLVETRQSTKALAILLKRKFPDTEIVYSKAGLSSDFRHEFGLVKSRNINDLHHAKDAFLAIVTGNVYHERFNRRWFMVNQPYSVKTKTLFTHSIKNGNFVAWNGEEDLGRIVKMLKQNKNTIHFTRFSFDRKEGLFDIQPLKASTGLVPRKAGLDVVKYGGYDKSTAAYYLLVRFTLEDKKTQHKLMMIPVEGLYKARIDHDKEFLTDYAQTTISEILQKDKQKVINIMFPMGTRHIKLNSMISIDGFYLSIGGKSSKGKSVLCHAMVPLIVPHKIECYIKAMESFARKFKENNKLRIVEKFDKITVEDNLNLYELFLQKLQHNPYNKFFSTQFDVLTNGRSTFTKLSPEEQVQTLLNILSIFKTCRSSGCDLKSINGSAQAARIMISADLTGLSKKYSDIRLVEQSASGLFVSKSQNLLEYL

SEQ ID NO: 713 - protein, 1399 aa, Olsenella uli DSM 7084
MNLRNTTDEYNIGLDMGTNSVGWAVTDKAGAIAHFKGKPTLGSRLFDAAQTAAGARIHRSQRRRYVRRRWRLDLLQSLFQDEVSKVDSEFFCRLRQSRLYVGDREKGHADYTWPIFNDSDFNEVDYYKRFPTIYHLRKWLMETDEKADIRLIYLATHNIVKHRGNFLRENNKSLSSRDANPAQAVKSLRLALNDWCSERDYECAWKGEEDDGAIDEAILNVLADGEKGRSDQAKEIAKLTGVDCGDAKQSKQCNEAIAKAIVGLKVEMKNIFGEFPAEKTSYIYLSSDEDVEAVRESCPDDSGELFQALCKLYSAYILQELLSYADPSGQTISANMVAKYKQYGRDLRLLKELTRTYAPQKYDLFFRGETYAGSSDYVVDEARGYTRYNLGTTKANYDDFQKSVKELFKGTDALQDERYQEMMVAFGEQKFLRRLKTSDNGSIYYQLHLEELHTILENQGKHYPFLLSEEDKIESLVSFRIPYYVGPLTRKNAAIGHDGKERFAWSSRKDGMEHAVITPWNWEEIIDRDKSAEDFIMRMTGDCTYLQGEPVLPKCSLLYEEFCALNEFNGAHWTVDGDDERRFDAAQRERIMCDLFRRTRSVTYNKVSDWLERKYNFTGARVRGGQGEHGFESKLGSYIFFCKDVFKTDGLDEADYTMIEQIILWSTLFEDRDILKRKIEEAYGGDRLTSEQIKVICKKRFTGWGRLSKRLLTDIKVNTDTGRKSIMDVLREGNPNNGQRSRTMVFMEVLRDEDLGFQKAIDGLNRDYFREHNNGLMDVNDLPGSPAIRRSINQAVRIVDEIASIARKEPTNIFIEVTREEDDPRKKGKRTKRRYDAIKSALEKFKKDDPSLWKELCEKAPGDMDERLSLYFMQRGKCMYSGRPIKIEELHTGKYEVDHIIPRSYIKDDSFENKVLVYREENQHKTDALLIDSSIRQKMGGYWRMLHDAKLVGDKKFRNLFRNHIDDKAMKGFVARQIVETSQMVKLVQTLFEARYPNTRIVPVKAGISHDLREAAGLVKCREANDFHHAHDAFLACRIGLFIQKRHPSVYDNPIGLARIMRDYARMQAREYKKSHCLAHTQGFIVNSFLSSGFDEETGEIFKDDWDAKAEVEGIRRVLNCRQCFISRMPVEGDTRYGGRYWGETIYSPKGKHKHEIPLKQGLDPNLYGGYSDLLYSYFLIYEASDVSSGERVLRFIGIPTSIAARMANQKRLEEYVSRLALQENLEHVRMVRKIMKKQLIEVDNCRLLVTAADAVTNATELAFSLDEMKIISTCAKCINGADPSAIDKIGNAQDSFFDNLKRRGSDRCALLFSQLKLDKLSQNFYMISSDDKSKILISILDRIRAKSNSVDLSLVGGAKHAAQMKFDFNAKLNNPASSFVLIDQSVTGMFERRTRIGL

SEQ ID NO: 714 - protein, 1389 aa, Oenococcus kitaharae DSM 17330
MARDYSVGLDIGTSSVGWAAIDNKYHLIRAKSKNLIGVRLFDSAVTAEKRRGYRTTRRRLSRRHWRLRLLNDIFAGPLTDFGDENFLARLKYSWVHPQDQSNQAHFAAGLLFDSKEQDKDFYRKYPTIYHLRLALMNDDQKHDLREVYLAIHHLVKYRGHFLIEGDVKADSAFDVHTFADAIQRYAESNNSDENLLGKIDEKKLSAALTDKHGSKSQRAETAETAFDILDLQSKKQIQAILKSVVGNQANLMAIFGLDSSAISKDEQKNYKFSFDDADIDEKIADSEALLSDTEFEFLCDLKAAFDGLTLKMLLGDDKTVSAAMVRRFNEHQKDWEYIKSHIRNAKNAGNGLYEKSKKFDGINAAYLALQSDNEDDRKKAKKIFQDEISSADIPDDVKADFLKKIDDDQFLPIQRTKNNGTIPHQLHRNELEQIIEKQGIYYPFLKDTYQENSHELNKITALINFRVPYYVGPLVEEEQKIADDGKNIPDPTNHWMVRKSNDTITPWNLSQVVDLDKSGRRFIERLTGTDTYLIGEPTLPKNSLLYQKFDVLQELNNIRVSGRRLDIRAKQDAFEHLFKVQKTVSATNLKDFLVQAGYISEDTQIEGLADVNGKNFNNALTTYNYLVSVLGREFVENPSNEELLEEITELQTVFEDKKVLRRQLDQLDGLSDHNREKLSRKHYTGWGRISKKLLTTKIVQNADKIDNQTFDVPRMNQSIIDTLYNTKMNLMEIINNAEDDFGVRAWIDKQNTTDGDEQDVYSLIDELAGPKEIKRGIVQSFRILDDITKAVGYAPKRVYLEFARKTQESHLTNSRKNQLSTLLKNAGLSELVTQVSQYDAAALQNDRLYLYFLQQGKDMYSGEKLNLDNLSNYDIDHIIPQAYTKDNSLDNRVLVSNITNRRKSDSSNYLPALIDKMRPFWSVLSKQGLLSKHKFANLTRTRDFDDMEKERFIARSLVETRQIIKNVASLIDSHFGGETKAVAIRSSLTADMRRYVDIPKNRDINDYHHAFDALLFSTVGQYTENSGLMKKGQLSDSAGNQYNRYIKEWIHAARLNAQSQRVNPFGFVVGSMRNAAPGKLNPETGEITPEENADWSIADLDYLHKVMNFRKITVTRRLKDQKGQLYDESRYPSVLHDAKSKASINFDKHKPVDLYGGFSSAKPAYAALIKFKNKFRLVNVLRQWTYSDKNSEDYILEQIRGKYPKAEMVLSHIPYGQLVKKDGALVTISSATELHNFEQLWLPLADYKLINTLLKTKEDNLVDILHNRLDLPEMTIESAFYKAFDSILSFAFNRYALHQNALVKLQAHRDDFNALNYEDKQQTLERILDALHASPASSDLKKINLSSGFGRLFSPSHFTLADTDEFIFQSVTGLFSTQKTVAQLYQETK

SEQ ID NO: 715 - protein, 1420 aa, Bifidobacterium bifidum S17
MSRKNYVDDYAISLDIGNASVGWSAFTPNYRLVRAKGHELIGVRLFDPADTAESRRMARTTRRRYSRRRWRLRLLDALFDQALSEIDPSFLARRKYSWVHPDDENNADCWYGSVLFDSNEQDKRFYEKYPTIYHLRKALMEDDSQHDIREIYLAIHHMVKYRGNFLVEGTLESSNAFKEDELLKLLGRITRYEMSEGEQNSDIEQDDENKLVAPANGQLADALCATRGSRSMRVDNALEALSAVNDLSREQRAIVKAIFAGLEGNKLDLAKIFVSKEFSSENKKILGIYFNKSDYEEKCVQIVDSGLLDDEEREFLDRMQGQYNAIALKQLLGRSTSVSDSKCASYDAHRANWNLIKLQLRTKENEKDINENYGILVGWKIDSGQRKSVRGESAYENMRKKANVFFKKMIETSDLSETDKNRLIHDIEEDKLFPIQRDSDNGVIPHQLHQNELKQIIKKQGKYYPFLLDAFEKDGKQINKIEGLLTFRVPYFVGPLVVPEDLQKSDNSENHWMVRKKKGEITPWNFDEMVDKDASGRKFIERLVGTDSYLLGEPTLPKNSLLYQEYEVLNELNNVRLSVRTGNHWNDKRRMRLGREEKTLLCQRLFMKGQTVTKRTAENLLRKEYGRTYELSGLSDESKFTSSLSTYGKMCRIFGEKYVNEHRDLMEKIVELQTVFEDKETLLHQLRQLEGISEADCALLVNTHYTGWGRLSRKLLTTKAGECKISDDFAPRKHSIIEIMRAEDRNLMEIITDKQLGFSDWIEQENLGAENGSSLMEVVDDLRVSPKVKRGIIQSIRLIDDISKAVGKRPSRIFLELADDIQPSGRTISRKSRLQDLYRNANLGKEFKGIADELNACSDKDLQDDRLFLYYTQLGKDMYTGEELDLDRLSSAYDIDHIIPQAVTQNDSIDNRVLVARAENARKTDSFTYMPQIADRMRNFWQILLDNGLISRVKFERLTRQNEFSEREKERFVQRSLVETRQIMKNVATLMRQRYGNSAAVIGLNAELTKEMHRYLGFSHKNRDINDYHHAQDALCVGIAGQFAANRGFFADGEVSDGAQNSYNQYLRDYLRGYREKLSAEDRKQGRAFGFIVGSMRSQDEQKRVNPRTGEVVWSEEDKDYLRKVMNYRKMLVTQKVGDDFGALYDETRYAATDPKGIKGIPFDGAKQDTSLYGGFSSAKPAYAVLIESKGKTRLVNVTMQEYSLLGDRPSDDELRKVLAKKKSEYAKANILLRHVPKMQLIRYGGGLMVIKSAGELNNAQQLWLPYEEYCYFDDLSQGKGSLEKDDLKKLLDSILGSVQCLYPWHRFTEEELADLHVAFDKLPEDEKKNVITGIVSALHADAKTANLSIVGMTGSWRRMNNKSGYTFSDEDEFIFQSPSGLFEKRVTVGELKRKAKKEVNSKYRTNEKRLPTLSGASQP

SEQ ID NO: 716 - protein, 1363 aa, Lactobacillus rhamnosus GG
MTKLNQPYGIGLDIGSNSIGFAVVDANSHLLRLKGETAIGARLFREGQSAADRRGSRTTRRRLSRTRWRLSFLRDFFAPHITKIDPDFFLRQKYSEISPKDKDRFKYEKRLFNDRTDAEFYEDYPSMYHLRLHLMTHTHKADPREIFLAIHHILKSRGHFLTPGAAKDFNTDKVDLEDIFPALTEAYAQVYPDLELTFDLAKADDFKAKLLDEQATPSDTQKALVNLLLSSDGEKEIVKKRKQVLTEFAKAITGLKTKFNLALGTEVDEADASNWQFSMGQLDDKWSNIETSMTDQGTEIFEQIQELYRARLLNGIVPAGMSLSQAKVADYGQHKEDLELFKTYLKKLNDHELAKTIRGLYDRYINGDDAKPFLREDFVKALTKEVTAHPNEVSEQLLNRMGQANFMLKQRTKANGAIPIQLQQRELDQIIANQSKYYDWLAAPNPVEAHRWKMPYQLDELLNFHIPYYVGPLITPKQQAESGENVFAWMVRKDPSGNITPYNFDEKVDREASANTFIQRMKTTDTYLIGEDVLPKQSLLYQKYEVLNELNNVRINNECLGTDQKQRLIREVFERHSSVTIKQVADNLVAHGDFARRPEIRGLADEKRFLSSLSTYHQLKEILHEAIDDPTKLLDIENIITWSTVFEDHTIFETKLAEIEWLDPKKINELSGIRYRGWGQFSRKLLDGLKLGNGHTVIQELMLSNHNLMQILADETLKETMTELNQDKLKTDDIEDVINDAYTSPSNKKALRQVLRVVEDIKHAANGQDPSWLFIETADGTGTAGKRTQSRQKQIQTVYANAAQELIDSAVRGELEDKIADKASFTDRLVLYFMQGGRDIYTGAPLNIDQLSHYDIDHILPQSLIKDDSLDNRVLVNATINREKNNVFASTLFAGKMKATWRKWHEAGLISGRKLRNLMLRPDEIDKFAKGFVARQLVETRQIIKLTEQIAAAQYPNTKIIAVKAGLSHQLREELDFPKNRDVNHYHHAFDAFLAARIGTYLLKRYPKLAPFFTYGEFAKVDVKKFREFNFIGALTHAKKNIIAKDTGEIVWDKERDIRELDRIYNFKRMLITHEVYFETADLFKQTIYAAKDSKERGGSKQLIPKKQGYPTQVYGGYTQESGSYNALVRVAEADTTAYQVIKISAQNASKIASANLKSREKGKQLLNEIVVKQLAKRRKNWKPSANSFKIVIPRFGMGTLFQNAKYGLFMVNSDTYYRNYQELWLSRENQKLLKKLFSIKYEKTQMNHDALQVYKAIIDQVEKFFKLYDINQFRAKLSDAIERFEKLPINTDGNKIGKTETLRQILIGLQANGTRSNVKNLGIKTDLGLLQVGSGIKLDKDTQIVYQSPSGLFKRRIPLADL

SEQ ID NO: 717 - protein, 1391 aa, Lactobacillus gasseri JV-V03
MTKIKNEYIVGLDVGTNSCGWVAMDFQNTILRMHGKTAIGSHLFDAGNSAADRRAFRTTRRRIKRRKWRLKLLEEIFDPYMTEVDPYFFARLKESGLSPLDKRKNVSSIVFPTALEDKKFYCNYPTIYHLRYDLMSEDKKFDLREIYLAIHHIVKYRGNFLYNTPVKDFEASKIDVKDSLEKLNELYERLDSEFTVELDSSNALEIEKIIRDKKVFKINKVKSIHQLLSLKTENKERTKLIKDVSKQIINAILGYKTKFETILLKNISKDEADDWEFKLTDVDADNKFENLIGDLNENEQEILLEIRNLANAITLSNIVEEGKTLSESMIDKYNKHSDDLELLKQVISDHPDRDKAKKLALAYDLYVNNRHGKLLQAKDVLGSKKTLSKEDFYKEVKKNLDDSKASQEILDTIALDSFMPKQRTNENGVIPYQLHQLELDRIIKNQGKYYPFLKEVNPVSSHLKEAPYKLDELIRFRVPYYVGPLISPNESTKNKQTKKNQNFAWMIRKEQGQITPWNFDQKVDRMASANKFIKRMTTKDTYLLGEDVLPANSLLYQKFTVLNELNNIKINGKRISVPLKEELYNNLFKKNSTVTTNKLKSYLKENYNLINVEIKGLADEKKFNSGLTTYNKLRNLKIFDQQLDDLNYDKDFERIIEWSTIFEDKAIYKDKLKTIKWLSDRQIDKLSKIRMQGWGQLSKKLLSQLTDNNGQTIIEQLWDSQNNFMQIVNQSDFKDAIAVANQNLLVNTSVEDILNEAYTSPANKKAIRQVVKVVDDIVKAASGKVPKQIAIEFTRDADDKAKISQTRANKLRKVYKELSNELASETIRNELERVAKDQKLLKDKYYLYFMQLGRDAYTGEPINIDDLGQYDIDHILPQSFIKDDSLENRVLVKKAVNNGKSDNVPVKLYGNRMAADLGMTIRHMWEKWKDQGLITKTKYNNLIIDPDKINKYESSGFIHRQLVETSQIIKLVSTILQSKYPDTEIIVVKARYNHYLRKHLNLYKSREVNDYHHAIDAYLSAICGNLLYQVYPYLRPFFVYGQYKKFSSDPKKEKIIYDKTRKYNFISQIFENKSNDIISLETKKKVFDKKDIIEKLKHAYNYKYMLVSRETETHDQEMFKMTVYPRLSRDTKKSRNLISKKKDMPTEIYGGYTNNSDAYMVIARINKKKGTEYRVFGVPMRELVNLRKAEKNGRYNAYLKQVLEPEIMYSKNGKKNKTISSFEIVKAKVPYKQVILDGDKKFMLASSTYVQNAKQLTLSQNSMQAITDNCENDTEEEKALEEKALIEAYDEILTNIDKYLPLFDINKFREKLHAGREKFINLSLDVKKDTILQVLNGLHDNAVMPKIKSLGLSTPLGFMQFSSGVPLSENAKLIYQSPTGLFEKRVKISDL

SEQ ID NO: 718 - protein, 1348 aa, Finegoldia magna ATCC 29328
MKSEKKYYIGLDVGTNSVGWAVTDEFYNILRAKGKDLWGVRLFEKADTAANTRIFRSGRRRNDRKGMRLQILREIFEDEIKKVDKDFYDRLDESKFWAEDKKVSGKYSLFNDKNFSDKQYFEKFPTIFHLRKYLMEEHGKVDIRYYFLAINQMMKRRGHFLIDGQISHVTDDKPLKEQLILLINDLLKIELEEELMDSIFEILADVNEKRTDKKNNLKELIKGQDFNKQEGNILNSIFESIVTGKAKIKNIISDEDILEKIKEDNKEDFVLTGDSYEENLQYFEEVLQENITLFNTLKSTYDFLILQSILKGKSTLSDAQVERYDEHKKDLEILKKVIKKYDEDGKLFKQVFKEDNGNGYVSYIGYYLNKNKKITAKKKISNIEFTKYVKGILEKQCDCEDEDVKYLLGKIEQENFLLKQISSINSVIPHQIHLFELDKILENLAKNYPSFNNKKEEFTKIEKIRKTFTFRIPYYVGPLNDYHKNNGGNAWIFRNKGEKIRPWNFEKIVDLHKSEEEFIKRMLNQCTYLPEETVLPKSSILYSEYMVLNELNNLRINGKPLDTDVKLKLIEELFKKKTKVTLKSIRDYMVRNNFADKEDFDNSEKNLEIASNMKSYIDFNNILEDKFDVEMVEDLIEKITIHTGNKKLLKKYIEETYPDLSSSQIQKIINLKYKDWGRLSRKLLDGIKGTKKETEKTDTVINFLRNSSDNLMQIIGSQNYSFNEYIDKLRKKYIPQEISYEVVENLYVSPSVKKMIWQVIRVTEEITKVMGYDPDKIFIEMAKSEEEKKTTISRKNKLLDLYKAIKKDERDSQYEKLLTGLNKLDDSDLRSRKLYLYYTQMGRDMYTGEKIDLDKLFDSTHYDKDHIIPQSMKKDDSIINNLVLVNKNANQTTKGNIYPVPSSIRNNPKIYNYWKYLMEKEFISKEKYNRLIRNTPLTNEELGGFINRQLVETRQSTKAIKELFEKFYQKSKIIPVKASLASDLRKDMNTLKSREVNDLHHAHDAFLNIVAGDVWNREFTSNPINYVKENREGDKVKYSLSKDFTRPRKSKGKVIWTPEKGRKLIVDTLNKPSVLISNESHVKKGELFNATIAGKKDYKKGKIYLPLKKDDRLQDVSKYGGYKAINGAFFFLVEHTKSKKRIRSIELFPLHLLSKFYEDKNTVLDYAINVLQLQDPKIIIDKINYRTEIIIDNFSYLISTKSNDGSITVKPNEQMYWRVDEISNLKKIENKYKKDAILTEEDRKIMESYIDKIYQQFKAGKYKNRRTTDTIIEKYEIIDLDTLDNKQLYQLLVAFISLSYKTSNNAVDFTVIGLGTECGKPRITNLPDNTYLVYKSITGIYEKRIRIK

SEQ ID NO: 719 - protein, 1236 aa, Mycoplasma mobile 163K
MYFYKNKENKLNKKVVLGLDLGIASVGWCLTDISQKEDNKFPIILHGVRLFETVDDSDDKLLNETRRKKRGQRRRNRRLFTRKRDFIKYLIDNNIIELEFDKNPKILVRNFIEKYINPFSKNLELKYKSVTNLPIGFHNLRKAAINEKYKLDKSELIVLLYFYLSLRGAFFDNPEDTKSKEMNKNEIEIFDKNESIKNAEFPIDKIIEFYKISGKIRSTINLKFGHQDYLKEIKQVFEKQNIDFMNYEKFAMEEKSFFSRIRNYSEGPGNEKSFSKYGLYANENGNPELIINEKGQKIYTKIFKTLWESKIGKCSYDKKLYRAPKNSFSAKVFDITNKLTDWKHKNEYISERLKRKILLSRFLNKDSKSAVEKILKEENIKFENLSEIAYNKDDNKINLPIINAYHSLTTIFKKHLINFENYLISNENDLSKLMSFYKQQSEKLFVPNEKGSYEINQNNNVLHIFDAISNILNKFSTIQDRIRILEGYFEFSNLKKDVKSSEIYSEIAKLREFSGTSSLSFGAYYKFIPNLISEGSKNYSTISYEEKALQNQKNNFSHSNLFEKTWVEDLIASPTVKRSLRQTMNLLKEIFKYSEKNNLEIEKIVVEVTRSSNNKHERKKIEGINKYRKEKYEELKKVYDLPNENTTLLKKLWLLRQQQGYDAYSLRKIEANDVINKPWNYDIDHIVPRSISFDDSFSNLVIVNKLDNAKKSNDLSAKQFIEKIYGIEKLKEAKENWGNWYLRNANGKAFNDKGKFIKLYTIDNLDEFDNSDFINRNLSDTSYITNALVNHLTFSNSKYKYSVVSVNGKQTSNLRNQIAFVGIKNNKETEREWKRPEGFKSINSNDFLIREEGKNDVKDDVLIKDRSFNGHHAEDAYFITIISQYFRSFKRIERLNVNYRKETRELDDLEKNNIKFKEKASFDNFLLINALDELNEKLNQMRFSRMVITKKNTQLFNETLYSGKYDKGKNTIKKVEKLNLLDNRTDKIKKIEEFFDEDKLKENELTKLHIFNHDKNLYETLKIIWNEVKIEIKNKNLNEKNYFKYFVNKKLQEGKISFNEWVPILDNDFKIIRKIRYIKFSSEEKETDEIIFSQSNFLKIDQRQNFSFHNTLYWVQIWVYKNQKDQYCFISIDARNSKFEKDEIKINYEKLKTQKEKLQIINEEPILKINKGDLFENEEKELFYIVGRDEKPQKLEIKYILGKKIKDQKQIQKPVKKYFPNWKKVNLTYMGEIFKK

SEQ ID NO: 720 - protein, 1269 aa, Mycoplasma gallisepticum str. F
MNNSIKSKPEVTIGLDLGVGSVGWAIVDNETNIIHHLGSRLFSQAKTAEDRRSFRGVRRLIRRRKYKLKRFVNLIWKYNSYFGFKNKEDILNNYQEQQKLHNTVLNLKSEALNAKIDPKALSWILHDYLKNRGHFYEDNRDFNVYPTKELAKYFDKYGYYKGIIDSKEDNDNKLEEELTKYKFSNKHWLEEVKKVLSNQTGLPEKFKEEYESLFSYVRNYSEGPGSINSVSPYGIYHLDEKEGKVVQKYNNIWDKTIGKCNIFPDEYRAPKNSPIAMIFNEINELSTIRSYSIYLTGWFINQEFKKAYLNKLLDLLIKTNGEKPIDARQFKKLREETIAESIGKETLKDVENEEKLEKEDHKWKLKGLKLNTNGKIQYNDLSSLAKFVHKLKQHLKLDFLLEDQYATLDKINFLQSLFVYLGKHLRYSNRVDSANLKEFSDSNKLFERILQKQKDGLFKLFEQTDKDDEKILAQTHSLSTKAMLLAITRMTNLDNDEDNQKNNDKGWNFEAIKNFDQKFIDITKKNNNLSLKQNKRYLDDRFINDAILSPGVKRILREATKVFNAILKQFSEEYDVTKVVIELARELSEEKELENTKNYKKLIKKNGDKISEGLKALGISEDEIKDILKSPTKSYKFLLWLQQDHIDPYSLKEIAFDDIFTKTEKFEIDHIIPYSISFDDSSSNKLLVLAESNQAKSNQTPYEFISSGNAGIKWEDYEAYCRKFKDGDSSLLDSTQRSKKFAKMMKTDTSSKYDIGFLARNLNDTRYATIVFRDALEDYANNHLVEDKPMFKVVCINGSVTSFLRKNFDDSSYAKKDRDKNIHHAVDASIISIFSNETKTLFNQLTQFADYKLFKNTDGSWKKIDPKTGVVTEVTDENWKQIRVRNQVSEIAKVIEKYIQDSNIERKARYSRKIENKTNISLFNDTVYSAKKVGYEDQIKRKNLKTLDIHESAKENKNSKVKRQFVYRKLVNVSLLNNDKLADLFAEKEDILMYRANPWVINLAEQIFNEYTENKKIKSQNVFEKYMLDLTKEFPEKFSEFLVKSMLRNKTAIIYDDKKNIVHRIKRLKMLSSELKENKLSNVIIRSKNQSGTKLSYQDTINSLALMIMRSIDPTAKKQYIRVPLNTLNLHLGDHDFDLHNMDAYLKKPKFVKYLKANEIGDEYKPWRVLTSGTLLIHKKDKKLMYISSFQNLNDVIEIKNLIETEYKENDDSDSKKKKKANRFLMTLSTILNDYILLDAKDNFDILGLSKNRIDEILNSKLGLDKIVK

SEQ ID NO: 721 - protein, 1265 aa, Mycoplasma ovipneumoniae SC01
MHNKKNITIGFDLGIASIGWAIIDSTTSKILDWGTRTFEERKTANERRAFRSTRRNIRRKAYRNQRFINLILKYKDLFELKNISDIQRANKKDTENYEKIISFFTEIYKKCAAKHSNILEVKVKALDSKIEKLDLIWILHDYLENRGFFYDLEEENVADKYEGIEHPSILLYDFFKKNGFFKSNSSIPKDLGGYSFSNLQWVNEIKKLFEVQEINPEFSEKFLNLFTSVRDYAKGPGSEHSASEYGIFQKDEKGKVFKKYDNIWDKTIGKCSFFVEENRSPVNYPSYEIFNLLNQLINLSTDLKTTNKKIWQLSSNDRNELLDELLKVKEKAKIISISLKKNEIKKIILKDFGFEKSDIDDQDTIEGRKIIKEEPTTKLEVTKHLLATIYSHSSDSNWININNILEFLPYLDAICIILDREKSRGQDEVLKKLTEKNIFEVLKIDREKQLDFVKSIFSNTKFNFKKIGNFSLKAIREFLPKMFEQNKNSEYLKWKDEEIRRKWEEQKSKLGKTDKKTKYLNPRIFQDEIISPGTKNTFEQAVLVLNQIIKKYSKENIIDAIIIESPREKNDKKTIEEIKKRNKKGKGKTLEKLFQILNLENKGYKLSDLETKPAKLLDRLRFYHQQDGIDLYTLDKINIDQLINGSQKYEIEHIIPYSMSYDNSQANKILTEKAENLKKGKLIASEYIKRNGDEFYNKYYEKAKELFINKYKKNKKLDSYVDLDEDSAKNRFRFLTLQDYDEFQVEFLARNLNDTRYSTKLFYHALVEHFENNEFFTYIDENSSKHKVKISTIKGHVTKYFRAKPVQKNNGPNENLNNNKPEKIEKNRENNEHHAVDAAIVAIIGNKNPQIANLLTLADNKTDKKFLLHDENYKENIETGELVKIPKFEVDKLAKVEDLKKIIQEKYEEAKKHTAIKFSRKTRTILNGGLSDETLYGFKYDEKEDKYFKIIKKKLVTSKNEELKKYFENPFGKKADGKSEYTVLMAQSHLSEFNKLKEIFEKYNGFSNKTGNAFVEYMNDLALKEPTLKAEIESAKSVEKLLYYNFKPSDQFTYHDNINNKSFKRFYKNIRIIEYKSIPIKFKILSKHDGGKSFKDTLFSLYSLVYKVYENGKESYKSIPVTSQMRNFGIDEFDFLDENLYNKEKLDIYKSDFAKPIPVNCKPVFVLKKGSILKKKSLDIDDFKETKETEEGNYYFISTISKRFNRDTAYGLKPLKLSVVKPVAEPSTNPIFKEYIPIHLDELGNEYPVKIKEHTDDEKLMCTIK

SEQ ID NO: 722 - protein, 1233 aa, Mycoplasma canis PG 14
MEKKRKVTLGFDLGIASVGWAIVDSETNQVYKLGSRLFDAPDTNLERRTQRGTRRLLRRRKYRNQKFYNLVKRTEVFGLSSREAIENRFRELSIKYPNIIELKTKALSQEVCPDEIAWILHDYLKNRGYFYDEKETKEDFDQQTVESMPSYKLNEFYKKYGYFKGALSQPTESEMKDNKDLKEAFFFDFSNKEWLKEINYFFNVQKNILSETFIEEFKKIFSFTRDISKGPGSDNMPSPYGIFGEFGDNGQGGRYEHIWDKNIGKCSIFTNEQRAPKYLPSALIFNFLNELANIRLYSTDKKNIQPLWKLSSVDKLNILLNLFNLPISEKKKKLTSTNINDIVKKESIKSIMISVEDIDMIKDEWAGKEPNVYGVGLSGLNIEESAKENKFKFQDLKILNVLINLLDNVGIKFEFKDRNDIIKNLELLDNLYLFLIYQKESNNKDSSIDLFIAKNESLNIENLKLKLKEFLLGAGNEFENHNSKTHSLSKKAIDEILPKLLDNNEGWNLEAIKNYDEEIKSQIEDNSSLMAKQDKKYLNDNFLKDAILPPNVKVTFQQAILIFNKIIQKFSKDFEIDKVVIELAREMTQDQENDALKGIAKAQKSKKSLVEERLEANNIDKSVFNDKYEKLIYKIFLWISQDFKDPYTGAQISVNEIVNNKVEIDHIIPYSLCFDDSSANKVLVHKQSNQEKSNSLPYEYIKQGHSGWNWDEFTKYVKRVFVNNVDSILSKKERLKKSENLLTASYDGYDKLGFLARNLNDTRYATILFRDQLNNYAEHHLIDNKKMFKVIAMNGAVTSFIRKNMSYDNKLRLKDRSDFSHHAYDAAIIALFSNKTKTLYNLIDPSLNGIISKRSEGYWVIEDRYTGEIKELKKEDWTSIKNNVQARKIAKEIEEYLIDLDDEVFFSRKTKRKTNRQLYNETIYGIATKTDEDGITNYYKKEKFSILDDKDIYLRLLREREKFVINQSNPEVIDQIIEIIESYGKENNIPSRDEAINIKYTKNKINYNLYLKQYMRSLTKSLDQFSEEFINQMIANKTFVLYNPTKNTTRKIKFLRLVNDVKINDIRKNQVINKFNGKNNEPKAFYENINSLGAIVFKNSANNFKTLSINTQIAIFGDKNWDIEDFKTYNMEKIEKYKEIYGIDKTYNFHSFIFPGTILLDKQNKEFYYISSIQTVRDIIEIKFLNKIEFKDENKNQDTSKTPKRLMFGIKSIMNNYEQVDISPFGINKKIFE

SEQ ID NO: 723 - protein, 1304 aa, Mycoplasma synoviae 53
MLNNVQNLWKYLLLLIFDKKIIFLFKIKVILIRRYMENNNKEKIVIGFDLGVASVGWSIVNAETKEVIDLGVRLFSEPEKADYRRAKRTTRRLLRRKKFKREKFHKLILKNAEIFGLQSRNEILNVYKDQSSKYRNILKLKINALKEEIKPSELVWILRDYLQNRGYFYKNEKLTDEFVSNSFPSKKLHEHYEKYGFFRGSVKLDNKLDNKKDKAKEKDEEEESDAKKESEELIFSNKQWINEIVKVFENQSYLTESFKEEYLKLFNYVRPFNKGPGSKNSRTAYGVFSTDIDPETNKFKDYSNIWDKTIGKCSLFEEEIRAPKNLPSALIFNLQNEICTIKNEFTEFKNWWLNAEQKSEILKFVFTELFNWKDKKYSDKKFNKNLQDKIKKYLLNFALENFNLNEEILKNRDLENDTVLGLKGVKYYEKSNATADAALEFSSLKPLYVFIKFLKEKKLDLNYLLGLENTEILYFLDSIYLAISYSSDLKERNEWFKKLLKELYPKIKNNNLEIIENVEDIFEITDQEKFESFSKTHSLSREAFNHIIPLLLSNNEGKNYESLKHSNEELKKRTEKAELKAQQNQKYLKDNFLKEALVPLSVKTSVLQAIKIFNQIIKNFGKKYEISQVVIEMARELTKPNLEKLLNNATNSNIKILKEKLDQTEKFDDFTKKKFIDKIENSVVFRNKLFLWFEQDRKDPYTQLDIKINEIEDETEIDHVIPYSKSADDSWFNKLLVKKSTNQLKKNKTVWEYYQNESDPEAKWNKFVAWAKRIYLVQKSDKESKDNSEKNSIFKNKKPNLKFKNITKKLFDPYKDLGFLARNLNDTRYATKVFRDQLNNYSKHHSKDDENKLFKVVCMNGSITSFLRKSMWRKNEEQVYRFNFWKKDRDQFFHHAVDASIIAIFSLLTKTLYNKLRVYESYDVQRREDGVYLINKETGEVKKADKDYWKDQHNFLKIRENAIEIKNVLNNVDFQNQVRYSRKANTKLNTQLFNETLYGVKEFENNFYKLEKVNLFSRKDLRKFILEDLNEESEKNKKNENGSRKRILTEKYIVDEILQILENEEFKDSKSDINALNKYMDSLPSKFSEFFSQDFINKCKKENSLILTFDAIKHNDPKKVIKIKNLKFFREDATLKNKQAVHKDSKNQIKSFYESYKCVGFIWLKNKNDLEESIFVPINSRVIHFGDKDKDIFDFDSYNKEKLLNEINLKRPENKKFNSINEIEFVKFVKPGALLLNFENQQIYYISTLESSSLRAKIKLLNKMDKGKAVSMKKITNPDEYKIIEHVNPLGINLNWTKKLENNN

SEQ ID NO: 724 - protein, 1114 aa, Eubacterium rectale ATCC 33656
MNYTEKEKLFMKYILALDIGIASVGWAILDKESETVIEAGSNIFPEASAADNQLRRDMRGAKRNNRRLKTRINDFIKLWENNNLSIPQFKSTEIVGLKVRAITEEITLDELYLILYSYLKHRGISYLEDALDDTVSGSSAYANGLKLNAKELETHYPCEIQQERLNTIGKYRGQSQIINENGEVLDLSNVFTIGAYRKEIQRVFEIQKKYHPELTDEFCDGYMLIFNRKRKYYEGPGNEKSRTDYGRFTTKLDANGNYITEDNIFEKLIGKCSVYPDELRAAAASYTAQEYNVLNDLNNLTINGRKLEENEKHEIVERIKSSNTINMRKIISDCMGENIDDFAGARIDKSGKEIFHKFEVYNKMRKALLEIGIDISNYSREELDEIGYIMTINTDKEAMMEAFQKSWIDLSDDVKQCLINMRKTNGALFNKWQSFSLKIMNELIPEMYAQPKEQMTLLTEMGVTKGTQEEFAGLKYIPVDVVSEDIFNPVVRRSVRISFKILNAVLKKYKALDTIVIEMPRDRNSEEQKKRINDSQKLNEKEMEYIEKKLAVTYGIKLSPSDFSSQKQLSLKLKLWNEQDGICLYSGKTIDPNDIINNPQLFEIDHIIPRSISFDDARSNKVLVYRSENQKKGNQTPYYYLTHSHSEWSFEQYKATVMNLSKKKEYAISRKKIQNLLYSEDITKMDVLKGFINRNINDTSYASRLVLNTIQNFFMANEADTKVKVIKGSYTHQMRCNLKLDKNRDESYSHHAVDAMLIGYSELGYEAYHKLQGEFIDFETGEILRKDMWDENMSDEVYADYLYGKKWANIRNEVVKAEKNVKYWHYVMRKSNRGLCNQTIRGTREYDGKQYKINKLDIRTKEGIKVFAKLAFSKKDSDRERLLVYLNDRRTFDDLCKIYEDYSDAANPFVQYEKETGDIIRKYSKKHNGPRIDKLKYKDGEVGACIDISHKYGFEKGSKKVILESLVPYRMDVYYKEENHSYYLVGVKQSDIKFEKGRNVIDEEAYARILVNEKMIQPGQSRADLENLGFKFKLSFYKNDIIEYEKDGKIYTERLVSRTMPKQRNYIETKPIDKAKFEKQNLVGLGKTKFIKKYRYDILGNKYSCSEEKFTSFC

SEQ ID NO: 725 - protein, 1121 aa, Streptococcus thermophilus LMD-9
MSDLVLGLDIGIGSVGVGILNKVTGEIIHKNSRIFPAAQAENNLVRRTNRQGRRLARRKKHRRVRLNRLFEESGLITDFTKISINLNPYQLRVKGLTDELSNEELFIALKNMVKHRGISYLDDASDDGNSSVGDYAQIVKENSKQLETKTPGQIQLERYQTYGQLRGDFTVEKDGKKHRLINVFPTSAYRSEALRILQTQQEFNPQITDEFINRYLEILTGKRKYYHGPGNEKSRTDYGRYRTSGETLDNIFGILIGKCTFYPDEFRAAKASYTAQEFNLLNDLNNLTVPTETKKLSKEQKNQIINYVKNEKAMGPAKLFKYIAKLLSCDVADIKGYRIDKSGKAEIHTFEAYRKMKTLETLDIEQMDRETLDKLAYVLTLNTEREGIQEALEHEFADGSFSQKQVDELVQFRKANSSIFGKGWHNFSVKLMMELIPELYETSEEQMTILTRLGKQKTTSSSNKTKYIDEKLLTEEIYNPVVAKSVRQAIKIVNAAIKEYGDFDNIVIEMARETNEDDEKKAIQKIQKANKDEKDAAMLKAANQYNGKAELPHSVFHGHKQLATKIRLWHQQGERCLYTGKTISIHDLINNSNQFEVDHILPLSITFDDSLANKVLVYATANQEKGQRTPYQALDSMDDAWSFRELKAFVRESKTLSNKKKEYLLTEEDISKFDVRKKFIERNLVDTRYASRVVLNALQEHFRAHKIDTKVSVVRGQFTSQLRRHWGIEKTRDTYHHHAVDALIIAASSQLNLWKKQKNTLVSYSEDQLLDIETGELISDDEYKESVFKAPYQHFVDTLKSKEFEDSILFSYQVDSKFNRKISDATIYATRQAKVGKDKADETYVLGKIKDIYTQDGYDAFMKIYKKDKSKFLMYRHDPQTFEKVIEPILENYPNKQINEKGKEVPCNPFLKYKEEHGYIRKYSKKGNGPEIKSLKYYDSKLGNHIDITPKDSNNKVVLQSVSPWRADVYFNKTTGKYEILGLKYADLQFEKGTGTYKISQEKYNDIKKKEGVDSDSEFKFTLYKNDLLLVKDTETKEQQLFRFLSRTMPKQKHYVELKPYDKQKFEGGEALIKVLGNVANSGQCKKGLGKSNISIYKVRTDVLGNQHIIKNEGDKPKLDF

SEQ ID NO: 726 - protein, 1150 aa, Enterococcus faecalis TX0012
MYSIGLDLGISSVGWSVIDERTGNVIDLGVRLFSAKNSEKNLERRTNRGGRRLIRRKTNRLKDAKKILAAVGFYEDKSLKNSCPYQLRVKGLTEPLSRGEIYKVTLHILKKRGISYLDEVDTEAAKESQDYKEQVRKNAQLLTKYTPGQIQLQRLKENNRVKTGINAQGNYQLNVFKVSAYANELATILKTQQAFYPNELTDDWIALFVQPGIAEEAGLIYRKRPYYHGPGNEANNSPYGRWSDFQKTGEPATNIFDKLIGKDFQGELRASGLSLSAQQYNLLNDLTNLKIDGEVPLSSEQKEYILTELMTKEFTRFGVNDVVKLLGVKKERLSGWRLDKKGKPEIHTLKGYRNWRKIFAEAGIDLATLPTETIDCLAKVLTLNTEREGIENTLAFELPELSESVKLLVLDRYKELSQSISTQSWHRFSLKTLHLLIPELMNATSEQNTLLEQFQLKSDVRKRYSEYKKLPTKDVLAEIYNPTVNKTVSQAFKVIDALLVKYGKEQIRYITIEMPRDDNEEDEKKRIKELHAKNSQRKNDSQSYFMQKSGWSQEKFQTTIQKNRRFLAKLLYYYEQDGICAYTGLPISPELLVSDSTEIDHIIPISISLDDSINNKVLVLSKANQVKGQQTPYDAWMDGSFKKINGKFSNWDDYQKWVESRHFSHKKENNLLETRNIFDSEQVEKFLARNLNDTRYASRLVLNTLQSFFTNQETKVRVVNGSFTHTLRKKWGADLDKTRETHHHHAVDATLCAVTSFVKVSRYHYAVKEETGEKVMREIDFETGEIVNEMSYWEFKKSKKYERKTYQVKWPNFREQLKPVNLHPRIKFSHQVDRKANRKLSDATIYSVREKTEVKTLKSGKQKITTDEYTIGKIKDIYTLDGWEAFKKKQDKLLMKDLDEKTYERLLSIAETTPDFQEVEEKNGKVKRVKRSPFAVYCEENDIPAIQKYAKKNNGPLIRSLKYYDGKLNKHINITKDSQGRPVEKTKNGRKVTLQSLKPYRYDIYQDLETKAYYTVQLYYSDLRFVEGKYGITEKEYMKKVAEQTKGQVVRFCFSLQKNDGLEIEWKDSQRYDVRFYNFQSANSINFKGLEQEMMPAENQFKQKPYNNGAINLNIAKYGKEGKKLRKFNTDILGKKHYLFYEKEPKNIIK

SEQ ID NO: 727 - protein, 1054 aa, Staphylococcus lugdunensis M23590
MNQKFILGLDIGITSVGYGLIDYETKNIIDAGVRLFPEANVENNEGRRSKRGSRRLKRRRIHRLERVKKLLEDYNLLDQSQIPQSTNPYAIRVKGLSEALSKDELVIALLHIAKRRGIHKIDVIDSNDDVGNELSTKEQLNKNSKLLKDKFVCQIQLERMNEGQVRGEKNRFKTADIIKEIIQLLNVQKNFHQLDENFINKYIELVEMRREYFEGPGKGSPYGWEGDPKAWYETLMGHCTYFPDELRSVKYAYSADLFNALNDLNNLVIQRDGLSKLEYHEKYHIIENVFKQKKKPTLKQIANEINVNPEDIKGYRITKSGKPQFTEFKLYHDLKSVLFDQSILENEDVLDQIAEILTIYQDKDSIKSKLTELDILLNEEDKENIAQLTGYTGTHRLSLKCIRLVLEEQWYSSRNQMEIFTHLNIKPKKINLTAANKIPKAMIDEFILSPVVKRTFGQAINLINKIIEKYGVPEDIIIELARENNSKDKQKFINEMQKKNENTRKRINEIIGKYGNQNAKRLVEKIRLHDEQEGKCLYSLESIPLEDLLNNPNHYEVDHIIPRSVSFDNSYHNKVLVKQSENSKKSNLTPYQYFNSGKSKLSYNQFKQHILNLSKSQDRISKKKKEYLLEERDINKFEVQKEFINRNLVDTRYATRELTNYLKAYFSANNMNVKVKTINGSFTDYLRKVWKFKKERNHGYKHHAEDALIIANADFLFKENKKLKAVNSVLEKPEIESKQLDIQVDSEDNYSEMFIIPKQVQDIKDFRNFKYSHRVDKKPNRQLINDTLYSTRKKDNSTYIVQTIKDIYAKDNTTLKKQFDKSPEKFLMYQHDPRTFEKLEVIMKQYANEKNPLAKYHEETGEYLTKYSKKNNGPIVKSLKYIGNKLGSHLDVTHQFKSSTKKLVKLSIKPYRFDVYLTDKGYKFITISYLDVLKKDNYYYIPEQKYDKLKLGKAIDKNAKFIASFYKNDLIKLDGEIYKIIGVNSDTRNMIELDLPDIRYKEYCELNNIKGEPRIKKTIGKKVNSIEKLTTDVLGNVFTNTQYTKPQLLFKRGN

SEQ ID NO: 728 - protein, 1096 aa, Eubacterium dolichum DSM 3991
MMEVFMGRLVLGLDIGITSVGFGIIDLDESEIVDYGVRLFKEGTAAENETRRTKRGGRRLKRRRVTRREDMLHLLKQAGIISTSFHPLNNPYDVRVKGLNERLNGEELATALLHLCKHRGSSVETIEDDEAKAKEAGETKKVLSMNDQLLKSGKYVCEIQKERLRTNGHIRGHENNFKTRAYVDEAFQILSHQDLSNELKSAIITIISRKRMYYDGPGGPLSPTPYGRYTYFGQKEPIDLIEKMRGKCSLFPNEPRAPKLAYSAELFNLLNDLNNLSIEGEKLTSEQKAMILKIVHEKGKITPKQLAKEVGVSLEQIRGFRIDTKGSPLLSELTGYKMIREVLEKSNDEHLEDHVFYDEIAEILTKTKDIEGRKKQISELSSDLNEESVHQLAGLTKFTAYHSLSFKALRLINEEMLKTELNQMQSITLFGLKQNNELSVKGMKNIQADDTAILSPVAKRAQRETFKVVNRLREIYGEFDSIVVEMAREKNSEEQRKAIRERQKFFEMRNKQVADIIGDDRKINAKLREKLVLYQEQDGKTAYSLEPIDLKLLIDDPNAYEVDHIIPISISLDDSITNKVLVTHRENQEKGNLTPISAFVKGRFTKGSLAQYKAYCLKLKEKNIKTNKGYRKKVEQYLLNENDIYKYDIQKEFINRNLVDTSYASRVVLNTLTTYFKQNEIPTKVFTVKGSLTNAFRRKINLKKDRDEDYGHHAIDALIIASMPKMRLLSTIFSRYKIEDIYDESTGEVFSSGDDSMYYDDRYFAFIASLKAIKVRKFSHKIDTKPNRSVADETIYSTRVIDGKEKVVKKYKDIYDPKFTALAEDILNNAYQEKYLMALHDPQTFDQIVKVVNYYFEEMSKSEKYFTKDKKGRIKISGMNPLSLYRDEHGMLKKYSKKGDGPAITQMKYFDGVLGNHIDISAHYQVRDKKVVLQQISPYRTDFYYSKENGYKFVTIRYKDVRWSEKKKKYVIDQQDYAMKKAEKKIDDTYEFQFSMHRDELIGITKAEGEALIYPDETWHNFNFFFHAGETPEILKFTATNNDKSNKIEVKPIHCYCKMRLMPTISKKIVRIDKYATDVVGNLYKVKKNTLKFEFD

SEQ ID NO: 729 - protein, 1119 aa, Lactobacillus coryniformis subsp. torquens KCTC 3535
MGYRIGLDVGITSTGYAVLKTDKNGLPYKILTLDSVIYPRAENPQTGASLAEPRRIKRGLRRRTRRTKFRKQRTQQLFIHSGLLSKPEIEQILATPQAKYSVYELRVAGLDRRLTNSELFRVLYFFIGHRGFKSNRKAELNPENEADKKQMGQLLNSIEEIRKAIAEKGYRTVGELYLKDPKYNDHKRNKGYIDGYLSTPNRQMLVDEIKQILDKQRELGNEKLTDEFYATYLLGDENRAGIFQAQRDFDEGPGAGPYAGDQIKKMVGKDIFEPTEDRAAKATYTFQYFNLLQKMTSLNYQNTTGDTWHTLNGLDRQAIIDAVFAKAEKPTKTYKPTDFGELRKLLKLPDDARFNLVNYGSLQTQKEIETVEKKTRFVDFKAYHDLVKVLPEEMWQSRQLLDHIGTALTLYSSDKRRRRYFAEELNLPAELIEKLLPLNFSKFGHLSIKSMQNIIPYLEMGQVYSEATTNTGYDFRKKQISKDTIREEITNPVVRRAVTKTIKIVEQIIRRYGKPDGINIELARELGRNFKERGDIQKRQDKNRQTNDKIAAELTELGIPVNGQNIIRYKLHKEQNGVDPYTGDQIPFERAFSEGYEVDHIIPYSISWDDSYTNKVLTSAKCNREKGNRIPMVYLANNEQRLNALTNIADNIIRNSRKRQKLLKQKLSDEELKDWKQRNINDTRFITRVLYNYFRQAIEFNPELEKKQRVLPLNGEVTSKIRSRWGFLKVREDGDLHHAIDATVIAAITPKFIQQVTKYSQHQEVKNNQALWHDAEIKDAEYAAEAQRMDADLFNKIFNGFPLPWPEFLDELLARISDNPVEMMKSRSWNTYTPIEIAKLKPVFVVRLANHKISGPAHLDTIRSAKLFDEKGIVLSRVSITKLKINKKGQVATGDGIYDPENSNNGDKVVYSAIRQALEAHNGSGELAFPDGYLEYVDHGTKKLVRKVRVAKKVSLPVRLKNKAAADNGSMVRIDVFNTGKKFVFVPIYIKDTVEQVLPNKAIARGKSLWYQITESDQFCFSLYPGDMVHIESKTGIKPKYSNKENNTSVVPIKNFYGYFDGADIATASILVRAHDSSYTARSIGIAGLLKFEKYQVDYFGRYHKVHEKKRQLFVKRDE

SEQ ID NO: 730 - protein, 1092 aa, Ilyobacter polytropus DSM 2926
MKYSIGLDIGIASVGWSVINKDKERIEDMGVRIFQKAENPKDGSSLASSRREKRGSRRRNRRKKHRLDRIKNILCESGLVKKNEIEKIYKNAYLKSPWELRAKSLEAKISNKEIAQILLHIAKRRGFKSFRKTDRNADDTGKLLSGIQENKKIMEEKGYLTIGDMVAKDPKFNTHVRNKAGSYLFSFSRKLLEDEVRKIQAKQKELGNTHFTDDVLEKYIEVFNSQRNFDEGPSKPSPYYSEIGQIAKMIGNCTFESSEKRTAKNTWSGERFVFLQKLNNFRIVGLSGKRPLTEEERDIVEKEVYLKKEVRYEKLRKILYLKEEERFGDLNYSKDEKQDKKTEKTKFISLIGNYTIKKLNLSEKLKSEIEEDKSKLDKIIEILTFNKSDKTIESNLKKLELSREDIEILLSEEFSGTLNLSLKAIKKILPYLEKGLSYNEACEKADYDYKNNGIKFKRGELLPVVDKDLIANPVVLRAISQTRKVVNAIIRKYGTPHTIHVEVARDLAKSYDDRQTIIKENKKRELENEKTKKFISEEFGIKNVKGKLLLKYRLYQEQEGRCAYSRKELSLSEVILDESMTDIDHIIPYSRSMDDSYSNKVLVLSGENRKKSNLLPKEYFDRQGRDWDTFVLNVKAMKIHPRKKSNLLKEKFTREDNKDWKSRALNDTRYISRFVANYLENALEYRDDSPKKRVFMIPGQLTAQLRARWRLNKVRENGDLHHALDAAVVAVTDQKAINNISNISRYKELKNCKDVIPSIEYHADEETGEVYFEEVKDTRFPMPWSGFDLELQKRLESENPREEFYNLLSDKRYLGWFNYEEGFIEKLRPVFVSRMPNRGVKGQAHQETIRSSKKISNQIAVSKKPLNSIKLKDLEKMQGRDTDRKLYEALKNRLEEYDDKPEKAFAEPFYKPTNSGKRGPLVRGIKVEEKQNVGVYVNGGQASNGSMVRIDVFRKNGKFYTVPIYVHQTLLKELPNRAINGKPYKDWDLIDGSFEFLYSFYPNDLIEIEFGKSKSIKNDNKLTKTEIPEVNLSEVLGYYRGMDTSTGAATIDTQDGKIQMRIGIKTVKNIKKYQVDVLGNVYKVKREKRQTF

SEQ ID NO: 731 - protein, 1156 aa, Ruminococcus albus 8
MGNYYLGLDVGIGSIGWAVINIEKKRIEDFNVRIFKSGEIQEKNRNSRASQQCRRSRGLRRLYRRKSHRKLRLKNYLSIIGLTTSEKIDYYYETADNNVIQLRNKGLSEKLTPEEIAACLIHICNNRGYKDFYEVNVEDIEDPDERNEYKEEHDSIVLISNLMNEGGYCTPAEMICNCREFDEPNSVYRKFHNSAASKNHYLITRHMLVKEVDLILENQSKYYGILDDKTIAKIKDIIFAQRDFEIGPGKNERFRRFTGYLDSIGKCQFFKDQERGSRFTVIADIYAFVNVLSQYTYTNNRGESVFDTSFANDLINSALKNGSMDKRELKAIAKSYHIDISDKNSDTSLTKCFKYIKVVKPLFEKYGYDWDKLIENYTDTDNNVLNRIGIVLSQAQTPKRRREKLKALNIGLDDGLINELTKLKLSGTANVSYKYMQGSIEAFCEGDLYGKYQAKFNKEIPDIDENAKPQKLPPFKNEDDCEFFKNPVVFRSINETRKLINAIIDKYGYPAAVNIETADELNKTFEDRAIDTKRNNDNQKENDRIVKEIIECIKCDEVHARHLIEKYKLWEAQEGKCLYSGETITKEDMLRDKDKLFEVDHIVPYSLILDNTINNKALVYAEENQKKGQRTPLMYMNEAQAADYRVRVNTMFKSKKCSKKKYQYLMLPDLNDQELLGGWRSRNLNDTRYICKYLVNYLRKNLRFDRSYESSDEDDLKIRDHYRVFPVKSRFTSMFRRWWLNEKTWGRYDKAELKKLTYLDHAADAIIIANCRPEYVVLAGEKLKLNKMYHQAGKRITPEYEQSKKACIDNLYKLFRMDRRTAEKLLSGHGRLTPIIPNLSEEVDKRLWDKNIYEQFWKDDKDKKSCEELYRENVASLYKGDPKFASSLSMPVISLKPDHKYRGTITGEEAIRVKEIDGKLIKLKRKSISEITAESINSIYTDDKILIDSLKTIFEQADYKDVGDYLKKTNQHFFTTSSGKRVNKVTVIEKVPSRWLRKEIDDNNFSLLNDSSYYCIELYKDSKGDNNLQGIAMSDIVHDRKTKKLYLKPDFNYPDDYYTHVMYIFPGDYLRIKSTSKKSGEQLKFEGYFISVKNVNENSFRFISDNKPCAKDKRVSITKKDIVIKLAVDLMGKVQGENNGKGISCGEPLSLLKEKN

SEQ ID NO: 732 - protein, 1101 aa, Akkermansia muciniphila ATCC BAA-835
MSRSLTFSFDIGYASIGWAVIASASHDDADPSVCGCGTVLFPKDDCQAFKRREYRRLRRNIRSRRVRIERIGRLLVQAQIITPEMKETSGHPAPFYLASEALKGHRTLAPIELWHVLRWYAHNRGYDNNASWSNSLSEDGGNGEDTERVKHAQDLMDKHGTATMAETICRELKLEEGKADAPMEVSTPAYKNLNTAFPRLIVEKEVRRILELSAPLIPGLTAEIIELIAQHHPLTTEQRGVLLQHGIKLARRYRGSLLFGQLIPRFDNRIISRCPVTWAQVYEAELKKGNSEQSARERAEKLSKVPTANCPEFYEYRMARILCNIRADGEPLSAEIRRELMNQARQEGKLTKASLEKAISSRLGKETETNVSNYFTLHPDSEEALYLNPAVEVLQRSGIGQILSPSVYRIAANRLRRGKSVTPNYLLNLLKSRGESGEALEKKIEKESKKKEADYADTPLKPKYATGRAPYARTVLKKVVEEILDGEDPTRPARGEAHPDGELKAHDGCLYCLLDTDSSVNQHQKERRLDTMTNNHLVRHRMLILDRLLKDLIQDFADGQKDRISRVCVEVGKELTTFSAMDSKKIQRELTLRQKSHTDAVNRLKRKLPGKALSANLIRKCRIAMDMNWTCPFTGATYGDHELENLELEHIVPHSFRQSNALSSLVLTWPGVNRMKGQRTGYDFVEQEQENPVPDKPNLHICSLNNYRELVEKLDDKKGHEDDRRRKKKRKALLMVRGLSHKHQSQNHEAMKEIGMTEGMMTQSSHLMKLACKSIKTSLPDAHIDMIPGAVTAEVRKAWDVFGVFKELCPEAADPDSGKILKENLRSLTHLHHALDACVLGLIPYIIPAHHNGLLRRVLAMRRIPEKLIPQVRPVANQRHYVLNDDGRMMLRDLSASLKENIREQLMEQRVIQHVPADMGGALLKETMQRVLSVDGSGEDAMVSLSKKKDGKKEKNQVKASKLVGVFPEGPSKLKALKAAIEIDGNYGVALDPKPVVIRHIKVFKRIMALKEQNGGKPVRILKKGMLIHLTSSKDPKHAGVWRIESIQDSKGGVKLDLQRAHCAVPKNKTHECNWREVDLISLLKKYQMKRYPTSYTGTPR

SEQ ID NO: 733 - protein, 1138 aa, Acidothermus cellulolyticus 11B
MGGSEVGTVPVTWRLGVDVGERSIGLAAVSYEEDKPKEILAAVSWIHDGGVGDERSGASRLALRGMARRARRLRRFRRARLRDLDMLLSELGWTPLPDKNVSPVDAWLARKRLAEEYVVDETERRRLLGYAVSHMARHRGWRNPWTTIKDLKNLPQPSDSWERTRESLEARYSVSLEPGTVGQWAGYLLQRAPGIRLNPTQQSAGRRAELSNATAFETRLRQEDVLWELRCIADVQGLPEDVVSNVIDAVFCQKRPSVPAERIGRDPLDPSQLRASRACLEFQEYRIVAAVANLRIRDGSGSRPLSLEERNAVIEALLAQTERSLTWSDIALEILKLPNESDLTSVPEEDGPSSLAYSQFAPFDETSARIAEFIAKNRRKIPTFAQWWQEQDRTSRSDLVAALADNSIAGEEEQELLVHLPDAELEALEGLALPSGRVAYSRLTLSGLTRVMRDDGVDVHNARKTCFGVDDNWRPPLPALHEATGHPVVDRNLAILRKFLSSATMRWGPPQSIVVELARGASESRERQAEEEAARRAHRKANDRIRAELRASGLSDPSPADLVRARLLELYDCHCMYCGAPISWENSELDHIVPRTDGGSNRHENLAITCGACNKEKGRRPFASWAETSNRVQLRDVIDRVQKLKYSGNMYWTRDEFSRYKKSVVARLKRRTSDPEVIQSIESTGYAAVALRDRLLSYGEKNGVAQVAVFRGGVTAEARRWLDISIERLFSRVAIFAQSTSTKRLDRRHHAVDAVVLTTLTPGVAKTLADARSRRVSAEFWRRPSDVNRHSTEEPQSPAYRQWKESCSGLGDLLISTAARDSIAVAAPLRLRPTGALHEETLRAFSEHTVGAAWKGAELRRIVEPEVYAAFLALTDPGGRFLKVSPSEDVLPADENRHIVLSDRVLGPRDRVKLFPDDRGSIRVRGGAAYIASFHHARVFRWGSSHSPSFALLRVSLADLAVAGLLRDGVDVFTAELPPWTPAWRYASIALVKAVESGDAKQVGWLVPGDELDFGPEGVTTAAGDLSMFLKYFPERHWVVTGFEDDKRINLKPAFLSAEQAEVLRTERSDRPDTLTEAGEILAQFFPRCWRATVAKVLCHPGLTVIRRTALGQPRWRRGHLPYSWRPWSADPWSGGTP

SEQ ID NO: 734 - protein, 1187 aa, Bifidobacterium longum DJO10A
MLSRQLLGASHLARPVSYSYNVQDNDVHCSYGERCFMRGKRYRIGIDVGLNSVGLAAVEVSDENSPVRLLNAQSVIHDGGVDPQKNKEAITRKNMSGVARRTRRMRRRKRERLHKLDMLLGKFGYPVIEPESLDKPFEEWHVRAELATRYIEDDELRRESISIALRHMARHRGWRNPYRQVDSLISDNPYSKQYGELKEKAKAYNDDATAAEEESTPAQLVVAMLDAGYAEAPRLRWRTGSKKPDAEGYLPVRLMQEDNANELKQIFRVQRVPADEWKPLFRSVFYAVSPKGSAEQRVGQDPLAPEQARALKASLAFQEYRIANVITNLRIKDASAELRKLTVDEKQSIYDQLVSPSSEDITWSDLCDFLGFKRSQLKGVGSLTEDGEERISSRPPRLTSVQRIYESDNKIRKPLVAWWKSASDNEHEAMIRLLSNTVDIDKVREDVAYASAIEFIDGLDDDALTKLDSVDLPSGRAAYSVETLQKLTRQMLTTDDDLHEARKTLFNVTDSWRPPADPIGEPLGNPSVDRVLKNVNRYLMNCQQRWGNPVSVNIEHVRSSFSSVAFARKDKREYEKNNEKRSIFRSSLSEQLRADEQMEKVRESDLRRLEAIQRQNGQCLYCGRTITFRTCEMDHIVPRKGVGSTNTRTNFAAVCAECNRMKSNTPFAIWARSEDAQTRGVSLAEAKKRVTMFTFNPKSYAPREVKAFKQAVIARLQQTEDDAAIDNRSIESVAWMADELHRRIDWYFNAKQYVNSASIDDAEAETMKTTVSVFQGRVTASARRAAGIEGKIHFIGQQSKTRLDRRHHAVDASVIAMMNTAAAQTLMERESLRESQRLIGLMPGERSWKEYPYEGTSRYESFHLWLDNMDVLLELLNDALDNDRIAVMQSQRYVLGNSIAHDATIHPLEKVPLGSAMSADLIRRASTPALWCALTRLPDYDEKEGLPEDSHREIRVHDTRYSADDEMGFFASQAAQIAVQEGSADIGSAIHHARVYRCWKTNAKGVRKYFYGMIRVFQTDLLRACHDDLFTVPLPPQSISMRYGEPRVVQALQSGNAQYLGSLVVGDEIEMDFSSLDVDGQIGEYLQFFSQFSGGNLAWKHWVVDGFFNQTQLRIRPRYLAAEGLAKAFSDDVVPDGVQKIVTKQGWLPPVNTASKTAVRIVRRNAFGEPRLSSAHHMPCSWQWRHE

SEQ ID NO: 735 - protein, 1138 aa, Bifidobacterium dentium Bd1
MLCRCHRRYRIGIDVGLMSVGLAAIEVDETGFPIRILNIQSVIHDGGIDPQLGKKKSISRKAISGVARRTRRMRRRKVVRLRQLDATLESLGFPIVEPDSLDTWEIWLTRAKLASSYIQDDETRKEDVSIALRHIARHRGWRNPYSNVESLFVDVAPSEQYEELRRKAEEKLGTSLSGNPTSAEIVECILKRQVGEVQLRTRSRKGVNGNAVEKEGLLPTKLMQSDNAAEIRRIFKVQRIDDETGRKLLRAVFKACSPKGSVERRVGRDALAPGLPRALKASLAFQEYRIANVLTNLVISEDGTKRKLTIAEKQRVFGFLSSNETDDITWIDVAEKLGLERRQIQGVGCLTADGEERISSTPPRNITALHIHSAKPVIREKLVAWWKAASPTVRETMVELLSNTVDIDRVREDMDYSSAVAFIDSLGDEELTALDSVDLLSGRAAYSRQTLKQLTERMLNTDDDLHEARKAVFGVDDNWKPPVDAISTSVGNPAVDRVLKIVNRYLLACQKRWRNPQSVQIEHVRESFSSVAKAKETERVQGERARYRNDLRRELCEQEGLNKIRESDIRRWESVQRQNGTCLYCGSPITFRTCEMDHIVPRKGVGSTNTRVNLAAACAACNKLKSNTAFSVWARTEGAANRKVSQRDAIERVKTFIFNKSVPPREQRAFKQAVISRLRQAESDPAIDNRSIESVAWMADELHRRIEAYFNQDADVSGNTPATQVWVFQGRVTALARKASGIEGRIHFAGEWKKTRLDRRHHAVDAAVIAMMNHSAAQTLVERDSLRLSQWITRKPETWKNYPFSEGQKKTRFKEWLDCMNALLDLLNDALDSDRVPVTRCQRMSLGNSQAHAATIRKMKRVELFSPMDADLIRRASTPALYCALTRLPEYSPEKGLPENRGREIVLNGRHIRSTETVDFFASGAAQLMVRNGSAEIGDSIHHMRIYRYRKTGAKSQEYVYGMIRVFQIDLLHASSENLFAVQLPSQSVSVRYGDKNVVQAIQEGRAEYLGHIVPNDEILISYEGVRMKDSEKIGAYANDFSGTASELAQRRHWVVVGSDVSKLALRPSYLSEEGLENSGSESERLSKQTRKVIEGKGWVVAVNILAKYHPVVIRRNALGEPRFRTNSGMPVSWRWDR

SEQ ID NO: 736 - protein, 1084 aa, Corynebacterium diphtheriae NCTC 13129
MKYHVGIDVGTFSVGLAAIEVDDAGMPIKTLSLVSHIHDSGLDPDEIKSAVTRLASSGIARRTRRLYRRKRRRLQQLDKFIQRQGWPVIELEDYSDPLYPWKVRAELAASYIADEKERGEKLSVALRHIARHRGWRNPYAKVSSLYLPDGPSDAFKAIREEIKRASGQPVPETATVGQMVTLCELGTLKLRGEGGVLSARLQQSDYAREIQEICRMQEIGQELYRKIIDVVFAAESPKGSASSRVGKDPLQPGKNRALKASDAFQRYRIAALIGNLRVRVDGEKRILSVEEKNLVFDHLVNLTPKKEPEWVTIAEILGIDRGQLIGTATMTDDGERAGARPPTHDTNRSIVNSRIAPLVDWWKTASALEQHAMVKALSNAEVDDFDSPEGAKVQAFFADLDDDVHAKLDSLHLPVGRAAYSEDTLVRLTRRMLSDGVDLYTARLQEFGIEPSWTPPTPRIGEPVGNPAVDRVLKTVSRWLESATKTWGAPERVIIEHVREGFVTEKRAREMDGDMRRRAARNAKLFQEMQEKLNVQGKPSRADLWRYQSVQRQNCQCAYCGSPITFSNSEMDHIVPRAGQGSTNTRENLVAVCHRCNQSKGNTPFAIWAKNTSIEGVSVKEAVERTRHWVTDTGMRSTDFKKFTKAVVERFQRATMDEEIDARSMESVAWMANELRSRVAQHFASHGTTVRVYRGSLTAEARRASGISGKLKFFDGVGKSRLDRRHHAIDAAVIAFTSDYVAETLAVRSNLKQSQAHRQEAPQWREFTGKDAEHRAAWRVWCQKMEKLSALLTEDLRDDRVVVMSNVRLRLGNGSAHKETIGKLSKVKLSSQLSVSDIDKASSEALWCALTREPGFDPKEGLPANPERHIRVNGTHVYAGDNIGLFPVSAGSIALRGGYAELGSSFHHARVYKITSGKKPAFAMLRVYTIDLLPYRNQDLFSVELKPQTMSMRQAEKKLRDALATGNAEYLGWLVVDDELVVDTSKIATDQVKAVEAELGTIRRWRVDGFFSPSKLRLRPLQMSKEGIKKESAPELSKIIDRPGWLPAVNKLFSDGNVTVVRRDSLGRVRLESTAHLPVTWKVQ

SEQ ID NO: 737 - protein, 1195 aa, Elusimicrobium minutum Pei191
MQKNINTKQNHIYIKQAQKIKEKLGDKPYRIGLDLGVGSIGFAIVSMEENDGNVLLPKEIIMVGSRIFKASAGAADRKLSRGQRNNHRHTRERMRYLWKVLAEQKLALPVPADLDRKENSSEGETSAKRFLGDVLQKDIYELRVKSLDERLSLQELGYVLYHIAGHRGSSAIRTFENDSEEAQKENTENKKIAGNIKRLMAKKNYRTYGEYLYKEFFENKEKHKREKISNAANNHKFSPTRDLVIKEAEAILKKQAGKDGFHKELTEEYIEKLTKAIGYESEKLIPESGFCPYLKDEKRLPASHKLNEERRLWETLNNARYSDPIVDIVTGEITGYYEKQFTKEQKQKLFDYLLTGSELTPAQTKKLLGLKNTNFEDIILQGRDKKAQKIKGYKLIKLESMPFWARLSEAQQDSFLYDWNSCPDEKLLTEKLSNEYHLTEEEIDNAFNEIVLSSSYAPLGKSAMLIILEKIKNDLSYTEAVEEALKEGKLTKEKQAIKDRLPYYGAVLQESTQKIIAKGFSPQFKDKGYKTPHTNKYELEYGRIANPVVHQTLNELRKLVNEIIDILGKKPCEIGLETARELKKSAEDRSKLSREQNDNESNRNRIYEIYIRPQQQVIITRRENPRNYILKFELLEEQKSQCPFCGGQISPNDIINNQADIEHLFPIAESEDNGRNNLVISHSACNADKAKRSPWAAFASAAKDSKYDYNRILSNVKENIPHKAWRFNQGAFEKFIENKPMAARFKTDNSYISKVAHKYLACLFEKPNIICVKGSLTAQLRMAWGLQGLMIPFAKQLITEKESESFNKDVNSNKKIRLDNRHHALDAIVIAYASRGYGNLLNKMAGKDYKINYSERNWLSKILLPPNNIVWENIDADLESFESSVKTALKNAFISVKHDHSDNGELVKGTMYKIFYSERGYTLTTYKKLSALKLTDPQKKKTPKDFLETALLKFKGRESEMKNEKIKSAIENNKRLFDVIQDNLEKAKKLLEEENEKSKAEGKKEKNINDASIYQKAISLSGDKYVQLSKKEPGKFFAISKPTPTTTGYGYDTGDSLCVDLYYDNKGKLCGEIIRKIDAQQKNPLKYKEQGFTLFERIYGGDILEVDFDIHSDKNSFRNNTGSAPENRVFIKVGTFTEITNNNIQIWFGNIIKSTGGQDDSFTINSMQQYNPRKLILSSCGFIKYRSPILKNKEG

SEQ ID NO: 738 - protein, 1132 aa, Nitratifractor salsuginis DSM 16511
MKKILGVDLGITSFGYAILQETGKDLYRCLDNSVVMRNNPYDEKSGESSQSIRSTQKSMRRLIEKRKKRIRCVAQTMERYGILDYSETMKINDPKNNPIKNRWQLRAVDAWKRPLSPQELFAIFAHMAKHRGYKSIATEDLIYELELELGLNDPEKESEKKADERRQVYNALRHLEELRKKYGGETIAQTIHRAVEAGDLRSYRNHDDYEKMIRREDIEEEIEKVLLRQAELGALGLPEEQVSELIDELKACITDQEMPTIDESLFGKCTFYKDELAAPAYSYLYDLYRLYKKLADLNIDGYEVTQEDREKVIEWVEKKIAQGKNLKKITHKDLRKILGLAPEQKIFGVEDERIVKGKKEPRTFVPFFFLADIAKFKELFASIQKHPDALQIFRELAEILQRSKTPQEALDRLRALMAGKGIDTDDRELLELFKNKRSGTRELSHRYILEALPLFLEGYDEKEVQRILGFDDREDYSRYPKSLRHLHLREGNLFEKEENPINNHAVKSLASWALGLIADLSWRYGPFDEIILETTRDALPEKIRKEIDKAMREREKALDKIIGKYKKEFPSIDKRLARKIQLWERQKGLDLYSGKVINLSQLLDGSADIEHIVPQSLGGLSTDYNTIVTLKSVNAAKGNRLPGDWLAGNPDYRERIGMLSEKGLIDWKKRKNLLAQSLDEIYTENTHSKGIRATSYLEALVAQVLKRYYPFPDPELRKNGIGVRMIPGKVTSKTRSLLGIKSKSRETNFHHAEDALILSTLTRGWQNRLHRMLRDNYGKSEAELKELWKKYMPHIEGLTLADYIDEAFRRFMSKGEESLFYRDMFDTIRSISYWVDKKPLSASSHKETVYSSRHEVPTLRKNILEAFDSLNVIKDRHKLTTEEFMKRYDKEIRQKLWLHRIGNTNDESYRAVEERATQIAQILTRYQLMDAQNDKEIDEKFQQALKELITSPIEVTGKLLRKMRFVYDKLNAMQIDRGLVETDKNMLGIHISKGPNEKLIFRRMDVNNAHELQKERSGILCYLNEMLFIFNKKGLIHYGCLRSYLEKGQGSKYIALFNPRFPANPKAQPSKFTSDSKIKQVGIGSATGIIKAHLDLDGHVRSYEVFGTLPEGSIEWFKEESGYGRVEDDPHH

SEQ ID NO: 739 - protein, 1179 aa, Sphaerochaeta globus str. Buddy
MSKKVSRRYEEQAQEICQRLGSRPYSIGLDLGVGSIGVAVAAYDPIKKQPSDLVFVSSRIFIPSTGAAERRQKRGQRNSLRHRANRLKFLWKLLAERNLMLSYSEQDVPDPARLRFEDAVVRANPYELRLKGLNEQLTLSELGYALYHIANHRGSSSVRTFLDEEKSSDDKKLEEQQAMTEQLAKEKGISTFIEVLTAFNTNGLIGYRNSESVKSKGVPVPTRDIISNEIDVLLQTQKQFYQEILSDEYCDRIVSAILFENEKIVPEAGCCPYFPDEKKLPRCHFLNEERRLWEAINNARIKMPMQEGAAKRYQSASFSDEQRHILFHIARSGTDITPKLVQKEFPALKTSIIVLQGKEKAIQKIAGFRFRRLEEKSFWKRLSEEQKDDFFSAWTNTPDDKRLSKYLMKHLLLTENEVVDALKTVSLIGDYGPIGKTATQLLMKHLEDGLTYTEALERGMETGEFQELSVWEQQSLLPYYGQILTGSTQALMGKYWHSAFKEKRDSEGFFKPNTNSDEEKYGRIANPVVHQTLNELRKLMNELITILGAKPQEITVELARELKVGAEKREDIIKQQTKQEKEAVLAYSKYCEPNNLDKRYIERFRLLEDQAFVCPYCLEHISVADIAAGRADVDHIFPRDDTADNSYGNKVVAHRQCNDIKGKRTPYAAFSNTSAWGPIMHYLDETPGMWRKRRKFETNEEEYAKYLQSKGFVSRFESDNSYIAKAAKEYLRCLFNPNNVTAVGSLKGMETSILRKAWNLQGIDDLLGSRHWSKDADTSPTMRKNRDDNRHHGLDAIVALYCSRSLVQMINTMSEQGKRAVEIEAMIPIPGYASEPNLSFEAQRELFRKKILEFMDLHAFVSMKTDNDANGALLKDTVYSILGADTQGEDLVFVVKKKIKDIGVKIGDYEEVASAIRGRITDKQPKWYPMEMKDKIEQLQSKNEAALQKYKESLVQAAAVLEESNRKLIESGKKPIQLSEKTISKKALELVGGYYYLISNNKRTKTFVVKEPSNEVKGFAFDTGSNLCLDFYHDAQGKLCGEIIRKIQAMNPSYKPAYMKQGYSLYVRLYQGDVCELRASDLTEAESNLAKTTHVRLPNAKPGRTFVIIITFTEMGSGYQIYFSNLAKSKKGQDTSFTLTTIKNYDVRKVQLSSAGLVRYVSPLLVDKIEKDEVALCGE

SEQ ID NO: 740 - protein, 1512 aa, Fibrobacter succinogenes subsp. succinogenes S85
MKKILGLDLGTNSIGWAVVNADEITRDDGSRYLKPNGISAAGSRIIPMSADILGDFEKGNSISQTAERTRMRMARRLHERALLRRERLLRVLNLLDFLPKHFADKIDRYGKFTDDSEPKLAWRKNTEGKYEFIFQDAFNEMLAEFKDKQPEIVEEGKKIPYDWTIYYLRKKALEKALSKEELSWILLQFNQKRGYYQLRGEEEEIPQDKKIEYLAQKVVKVEATDQKKGDDVWYNVYLENGMIYRRTSKAPLDWEGKVKEFIVTTEVENDGETPKKDKEGNIKRSFRAPKEDDWTLLKKKTEADIENSHKTVGCYIYDSLLNNPKQKIIGKLVRTVERKFYKEELTQILKKQVELIPELRDDNLYKQCIEELYPINEAHRNTIAKTDFANLFINDILFYQRPLKSKKSQIDNCPYEERIFIDSKTGEKKKVPVKCIAKSNPLFQEFRLWQFIQNLRIYQREKEIDGKLLTDIDITSECLKSEEDYVRLFDWLNDRETIEQEDLLKHLFNTKKSKNKENPYRWNYVEDKVYPCNETRATILKGFSKCGINASVLSPELEMALWHILYSVEDKKEIETALTHFAQKQGWNDDFAKVFSKAKPFKKDYGSYSEKAIKKLLSLMRMGKYWNQDNIDKNTLDRIDKIINGEYDEKISNRVRDNAINLKDISDFRGLPVWLACYIVYDRHSEAKDCTKWNSPEEIDSYLKKFKQHSLRNPIVEQVVTETLRTVRDIWIQEEQIDEIHLELGRDLKNPADKRKKMSENILKNENTNLRIKAMLMEFMNPSMGIENVRPYSPSQQDILRIYEENALDNLTKDDKDFDFISKISKQAQPSKTDIIRYKCWLEQKYRSPYTGKTISLSKLFTPAYEIEHVIPQSLYFDDSFSNKVICEAEVNKLKDRQLGYKFIAEHHGEKVQLSQGEVVEILSVDAYEKFVKENYANNRIKMKKLLMESIPDEFIERQLNDSRYISKVVKGLLSNIVREKIDDENYEPEAVSKNLISCNGAITDRLKKDWGMNDVWNSIILPRFIRMNQITGKDCFTTTNAEGHLIPQMPLELQKGFNKKRIDHRHHAMDAIVIACTTRDHVNLLNNEAAHSKFNATRYQLQRKLRRFEKAVIDGKEREVAKEFLKPWDSFSSDSKNILENIIVSFKQNQRVINKTTNAFLHFDENGKKTFIKQGKGDSWAIRKSMHKDTVFGEINLRKVRSVSLNEAIKVPERVLNKKIKEKILELKNNKIDAKNIKKYIEENHTGGYGIDSSKIDVFYFTKETKERFFATRKTLDTSFNQAKIKDSIADSGIQKILLAHLKSKNGDAEQAFSPDGIDEMNKNIVELNNGKFHQPILKVRVYEKADKFAVGQKGNKKVKFVEAAKGTNLFFAIFEKDGKRSYLTIPLNVMIDCQKQYGNQWKNNIEAYLKEKELVEKDVKLQFILSPNDLVYLPTEGSIDKKRIYKVVSFTNNRLYAIPYAIAKSIVDKNEFTQLNKIEFTDNKESIKDACVPVIIDRLGNVIEFNGKRL

SEQ ID NO: 741 - protein, 1436 aa, Bacteroides fragilis NCTC 9343
MKRILGLDLGTNSIGWALVNEAENKDERSSIVKLGVRVNPLTVDELTNFEKGKSITTNADRTLKRGMRRNLQRYKLRRETLTEVLKEHKLITEDTILSENGNRTTFETYRLRAKAVTEEISLEEFARVLLMINKKRGYKSSRKAKGVEEGTLIDGMDIARELYNNNLTPGELCLQLLDAGKKFLPDFYRSDLQNELDRIWEKQKEYYPEILTDVLKEELRGKKRDAVWAICAKYFVWKENYTEWNKEKGKTEQQEREHKLEGIYSKRKRDEAKRENLQWRVNGLKEKLSLEQLVIVFQEMNTQINNSSGYLGAISDRSKELYFNKQTVGQYQMEMLDKNPNASLRNMVFYRQDYLDEFNMLWEKQAVYHKELTEELKKEIRDIIIFYQRRLKSQKGLIGFCEFESRQIEVDIDGKKKIKTVGNRVISRSSPLFQEFKIWQILNNIEVTVVGKKRKRRKLKENYSALFEELNDAEQLELNGSRRLCQEEKELLAQELFIRDKMTKSEVLKLLFDNPQELDLNFKTIDGNKTGYALFQAYSKMIEMSGHEPVDFKKPVEKVVEYIKAVFDLLNWNTDILGFNSNEELDNQPYYKLWHLLYSFEGDNTPTGNGRLIQKMTELYGFEKEYATILANVSFQDDYGSLSAKAIHKILPHLKEGNRYDVACVYAGYRHSESSLTREEIANKVLKDRLMLLPKNSLHNPVVEKILNQMVNVINVIIDIYGKPDEIRVELARELKKNAKEREELTKSIAQTTKAHEEYKTLLQTEFGLTNVSRTDILRYKLYKELESCGYKTLYSNTYISREKLFSKEFDIEHIIPQARLFDDSFSNKTLEARSVNIEKGNKTAYDFVKEKFGESGADNSLEHYLNNIEDLFKSGKISKTKYNKLKMAEQDIPDGFIERDLRNTQYIAKKALSMLNEISHRVVATSGSVTDKLREDWQLIDVMKELNWEKYKALGLVEYFEDRDGRQIGRIKDWTKRNDHRHHAMDALTVAFTKDVFIQYFNNKNASLDPNANEHAIKNKYFQNGRAIAPMPLREFRAEAKKHLENTLISIKAKNKVITGNINKTRKKGGVNKNMQQTPRGQLHLETIYGSGKQYLTKEEKVNASFDMRKIGTVSKSAYRDALLKRLYENDNDPKKAFAGKNSLDKQPIWLDKEQMRKVPEKVKIVTLEAIYTIRKEISPDLKVDKVIDVGVRKILIDRLNEYGNDAKKAFSNLDKNPIWLNKEKGISIKRVTISGISNAQSLHVKKDKDGKPILDENGRNIPVDFVNTGNNHHVAVYYRPVIDKRGQLVVDEAGNPKYELEEVVVSFFEAVTRANLGLPIIDKDYKTTEGWQFLFSMKQNEYFVFPNEKTGFNPKEIDLLDVENYGLISPNLFRVQKFSLKNYVFRHHLETTIKDTSSILRGITWIDFRSSKGLDTIVKVRVNHIGQIVSVGEY

SEQ ID NO: 742 - protein, 1426 aa, Capnocytophaga ochracea DSM 7271
MKNILGLDLGTTSIGFAHIVEDENKEKSEIKELGVRIVSLTTDEQSDFEKGKSITTNANRTLKHGARLNLDRYQQRRKYLIDLLQKANLITPSSILAENGKNTTHSTWQLRAKAVTERIEKEEFARILLAINKKRGYKSSRKAKTEDEGQAIDGMAIAKRLYDENLTPGQLSLQLLQQNKKLLPDFYRSDLQKEFDLVWNFQKQFYPDILTDIFYKELQGKGKDATSKAFSKRYHFDTTENKGSKESVRLQAYQWRAEAISKQLSKEEVAYVLTEINNNLNNASGYLGAISDRSKELYFNRQTVGQYLYAKLQENRHNSLKNKVFYRQDYLDEFERIWETQASFHKELTDELKKQIRDVVIFYQRKPKSQKGLISFCEFESKEIEIEKDGKTITKNIGARVVPKSSPLFQEFKIWQILNNVICKRKGIRKKKISAKTTQLDLLNESSQTIFSLDMECKQLLFDELNLKGDLKSDKVLKLLGYSPQEWEINYNQLEGNRTQKALYEAYLKIVEMEAHDVKDILQIKSAKDDWSLDESPLSASEIREKVKAIFQTLGICTKILYFDPLLPVKEFEEQDSYQLWHLLYSYESDDSTSGNETLYRILEKKYAFKREHARILANVALQDDYGSLSTKAIRKIYPNIKENQYSTACEKAGYKHSKLSLTTEELEARELKNIIPLLKKNALRNPVVEKILNQMINVVNALIEKNSERDAEGKITKYFHFDEIRIELARELKKNAQKRYEMTQNINKAKLEHQKISEILQKEFGIKNPTKSDIIRYRLYQELEHNGYKELYTNAPIARDMLFSKNIEIEHIVPKARVFDDSFSNKTLTFHRINSDKGEYTAFDYITSLNSEEELNQYLTRVENAYKTKSISPTKYKNLLKKASEIGDDFINRDLRDTQYIAKKAKEILFQVTKNVLSTSGSITDRLREDWGLVDVMKELNMPKYQSLGLTEVEERKDGNKVTVIKNWTKRNDHRHHAMDALTVAFTKPSYIQYLNHLNARKDENNKNYSVILAIEEKETIKVPTNNGKNKRVFIEPIPNFRQVAKKHLEEIFISHKAKNKVVTKNTNKPAGTDKQQITLTPRGQLHKETIYGKYQYYINKEEKIGVKFDERTIAKVSNPVYREALLKRLQANDNDPKKAFAGKNALSKNPIYLDESKTKTLPEKVNLTYLEEDFSIRKDISPDNFKDLKSIEKVIDQGVKRILIKRLQAYDNDPKKAFVDLEKNPIWLNKEKGIAIKRVTISGVNNAQPLHIGKDHLGKTTLNKEGKEIPVDYVSTGNNHHVAIYRDKEGNLQEQIVSFFDAVVRAQQGIPIIDKTYKQAEGWQFLFTMKQNEMFVFPNATTGFNPAEIDLLDPKNKKLISPNLFRVQKIATKDYFFRHHLETNVETDNILKNVTWKREGLSGLKDIVKVRINHLGDIVSIGEY

SEQ ID NO: 743 - protein, 1066 aa, Rhodopseudomonas palustris BisB18
MSERVVRRILGIDLGIASCGWGVVDISGAGGGIIATGVRCFDAPLIDKTGEPKSATRRTARGQRRIVRRRRQRMNGVRRLLCEFGLLPDPRPDALNQAMRRISTASAAAQVTPWTLRAAAHQRLLSNEELAVVLGHIARHRGFRSNAKNEAGANAADETSKMKKAMEATREGLAKYHAFGDMIANDPKFANRKRNRDKDYSHTAKRSDLEDEVRAILRAQLRFGSAAATETLAQTFADVAFFQRPLQDSEDRVGDCPFEPGQKRAARRAPSFELFRFLSRLANLKLAVGRSPERRLTAEEIALAAKGFGETKKTITFKSLREALDLDPNARFSGIGKDKEASLDVVARTGGAAYGTKTLKDALGDAPWRSLSRTPETLDRIAEILSFREDITSIRNGLEDLGLDSLVVEALMQAAANGDFKEFTRAGHISARAARNIIPGLREGLVYSEACARVGYDHAARLSVPLDQVGSPVTRKALSEALKQVRAVAREYGPIDYFHIELARSVGKSAEERKQLTDGIEARNVEKAKRRKQAEEHLGRAPSDDELLRYELAKEQNFKCIYSGDAIDPAGVAANDTRYQVDHILPWSRFGDDSYLNKTLCTARSNQNKRGRTPFEWFEADKTDVEWMEYVARVENLQEVKGRKKRNYSIKDAAAIEDKFKARNLTDTQWATRLLADELSRMFPPRECERAICGRADGGNDGLTIVEERRVFTRPGAITSKLRRAWGLEGLKKQDGKRVEDDRHHAVDALVLAATTESLLQRLTVEVQRREREGRPDDIFHCAEPWRGFRADVRRTVYGSETMPGIFVSRAERRRARGKAHDATIKQIREIEGERLVFERKPVEKLTDKDLEKIPIPKPYGQVSDPKRLRDELVESLRAWIAAGKPKDRPPLSPKGDVIRKVRIQTNDKVSVEINGGTVDRGDMARVDVFRKKNKKAVWEYYVVPIYPHQIVALNDPPDRAVIAYAEDKDWKEIDSSYEFLWSLFGLSYVEISKANGECIDGYFRGLHRGTGAASVCKHISLGKDATVSGIGLKTLASFKKFTIDRLGRKFEIPREVRTWRGEACT

SEQ ID NO: 744 - protein, 1425 aa, Prevotella micans F0438
MIQKIFGLDLGTNSIGSSVRNLELGENLTEQLEFFSSDIFGSSVSKNSNGREYSLAGNRSAHRRSRGLNEARRRKLWATLDLLIEHGLCPMSPDSLMQWRTYDKQKGLYRQYPIEDKDFNAWIMLDFNGDGKPDYSSPYQLRRELVVRQFDFDQPIERYKLGRALYHIAQHRGFKSSKGETIADQEKNEKKPIAEEGADIANEMKASETKLSKGLVAYMQENHLKTVGEAFAKLEDERVRIRNNESYRAIRSQYQDEIKEIFTYQKKLSVESELYERLTSEKKGVGTIFYKRPLRSQRGNVGKCTLERNKPRCPIGRPEFEEFRAWTLINNIKIRETAGEPYKQLPIKLRQELLKDCFLSKVKADFKFEDIRKYIEKRLGLSFSNDDKTINYKDSVSIAACPVTVRMKKLLGENWANCRIDGEKRRQAHGKNNNNEHIVSYTEEDIWHVCYNAEDPEEVSNFARKALHWDENKIKELVRLWTSIPQGYAMLSLKAIRNINRMLLLGLKYSDAVLLAKLPDIVPVSDEDILAITKEFLQLEDKLNQEKQINNIVNSLIANYKSKLEENRFADHNYQYQLGEGDDEDINTQIKSHIGAKLWVQIGADEQTKIFQAVRSKYQDFFKSYKRKFVESPKLGELLVAFLTEKFPNVKSKQWERLYHPSQIAIYRPIPVDNDRSKLRLGNPNIGAIKNPTVMRVLNTLRRRVNQLLDDGVISPDETRVVVETARELNDANTKWALDRYNRIRRDENEKIRKILKELNPTTNSISEQDIDKARYIFEQCETDFYTDGKVPYYNKDIKKYKLWLEQGGQCLYTGQTINLTNLFNPNAFDMEHTIPKSISFDNSDQNLTLCESYYNRFIKKNNIPTDMPNYDKDVTINGKEYTAIKPRLQRWKERVDRLSRNVDFWKGQARRAQDKDRKDECIREKHLWDMELAYWKGKLERFTMTDVTDGFKNSQLVDTRVITRHAVLYLKSIFNHVEVQRGETTAEFRKILGLQSIDEKKDRSLHSHHAIDATMLTVIPSAAKRDRMLELFYKIEETKKALKNYNDNNKTGLNLELKGLEEKLDKEKKDCRVGRRVNDLDRFINENIIVSHHTKDQALTPAHRRLRKRGKIVGGKEHPRWQTGDSLRGEIHKASYYGAITQFAKDANGKVLMKDGQAQIDPTIYYVIRRELKYKRSTQDSGFTNWEDLEKVIVDTDLFGLMKGQFPEGTSFKDACEQGFYMIKKGKNGEGDVKTHRIRHVRCKAVKTALRIKEQTYKSSKDYKQFFYAAVGDLYVMCYYTDGKKRDFKIYSLYDISNHRKSGTEDIPKFITDKKGNHLPLDYKLRTGDMVLLYKDNPEELKDLDQVNLKRRLYKVNRFESEGLIILLTHHLSTTTERGCSIGKIENYQNLPTAIRCGIKTIKFLIMGKHRDFVIRNGNIEFKH

SEQ ID NO: 745 - protein, 1204 aa, Prevotella ruminicola 23
MERILGIDTGTNSLGWAIVDKDENQYHLVAKGTNIFSEGVKIEKGIESSKAAERTEHRSVRKHYWRRKIRKIRLLTILSDNDLCPRLKHEQLRQWRLKKVYPTDDTFMEWQRTEDKAQVNPYKFRYICLTQKLDLSDITQRFILGRALYHLNQRRGFLSNRKEATKESEGTVKEGISSLSKDMKDSGCEYLGEYFYQLYQQGKKIRNHYTARKEHYLKEFKAICSKQELDDALIEKLEKAIFDQRPLKSQKGQVGTCTFEKGKSRCPSSHPLYEDFRMYSFINNIKVQVDTLYDKGERSLTDEEKQLIIPLFKRKSKRTFPFEDIAKKIAGKNNYCYIKSNEEKAYKFNYQMDTQVSGSPVNAQLEEIFGEDWLSSVCEVYTLANNKSRFQIMNDVWHVLFFYDDEDKLKEFAKDRLQLDDELAEKFSKISIPNDYAALSLKAIRKIMPYLRDYGLIYSEAVFLANLVDVLPQHVWGIKEMREAAIENVIDVMHSYDKNNIDGITLEGCVKTFLKERYQVSDDNLKKLYHPSMLDPYPRQRPNDEGVFQLGSPRISSVKNPMAMHSLFRLRKVVNLMLKKGYITPDTKVHIEFSRDLNDANKRWAIQTWQRENEKERERCRKEIEKYIASPSDTDILKYQLWEEQNHKCLYTGDEIRITDFLGDNPKYDIEHTIPRSAGGDSTKMNLTLCSSRFNRDEKKTKLPAELVNHDEILERISNWKEKYEDIDKQIRKISTKGATSKEDKDSKIRRRHYLILQRDYWRGKYQRFTMTEVPEGFSRRQGTDISVISRYARMYLKSVFKQVYIVKGIATSDFRKMWGIQDEYAKKERVNHVHHCIDAITIACIGKAEYDKLADYRHQYDDYLFQGKTKPTFDKPWPSFVIDIKHIQDELLIAHYAKDNLEKFTKKNLRGKDGRIIRDKFGNKLQMKGDTSRNSLHNDKFYGAINHEGEIKYVYRTNIEALDAKSIGNIVDPTVRSIIESAIAIHGSLKAAINKGIWMNEEKHIPIKKVRVFRNDVKKPIELKDQRDLSDKDYKQHYYVTNDGNYMMLIFSKLNNKGREIRQHVVINSLEATEVIKSHKRSQVGKVVWESYYSKEGFDLIYKLKSGTMILLYENNRDEVWDLDIRNLQKRLYIITKMKYDGRIYMMHHQEAREKKDLEEKSGSFKINEDYRPLIVNSYNQFNALVQDLDFEINDLGEIRRLI

SEQ ID NO: 746 - protein, 1535 aa, Flavobacterium columnare ATCC 49512
MTKILGLDLGTNSIGWAIRDTENEGINQILDKGARIFSEGVKSENGKEISRAAERTAYRSARKIKYRRKLRKYETLKVLSINGMCPLSVEEVEQWKKSGFKEYPLNPEFLDWLRTNEDKNINPYLFRDKASKQKVTLFELGRALYHIAQRRGFLSNRLDQSAEGVFEEHNPQIQNLIEDLDSSNTILNELKEYYINLGIIDETEKSGFKKDLDEGEKKLKSLYNSLVAITKKNANDIETCKQELIARLNKKEDLGKVKGKIKDISQAMLDRNFKTLGQYFFSLYNKERIRNQYTSREEHYLEEFIIICQTQGIEGINTNEKLPEKKFTGLAKDLYRAIFFQRPLKSQKGLIGKCSFEKNKSRCAVSHPDYEEFRMWSYLNTIKIGTQSEKTLRFLTLEEKLKLVPKFYRKSDFNFEVLAKELVEKGASFGYYKSSKKNEFFYWFNYKPTDSVSACVVSASLENAIGKDWKIKTFEYQTRNTEKNEVTKSVDYKDLWHLLSVATSDTYLYDFAIEKLKLEPKNAKAFSKTKLKKDFASLSLAAIAKILPYLKQGLLYSHAVFMANIENIVDADIWKDEEQQKFIQSKIVELVDNYIVEKSKLELINGLLKIYNTEDKEGRKVYYSKEAESLFEADLRKKLVPFYKANIIIEEHEQEIIFQDLFPILMDQLKKQEFIKIGRLDKQIEAFLEGENEEGQIFCNHTDKLKKLYHPSDIEVFKKKTIKDEWGNEKVVLGSPLTTSIKNPMAMRALHQLRKVLNTLIANDQIDEDTRIHIEMARELNDANKRKGIQDFQNENKKFREEAIKEIKKLYLEECHKDVNPTEDDILRYQLWLEQGKCEIYEEGNNISICDIIGSNPSYDIEHTIPRSISQDNSQMNKTLCSLKFNRSIKKQKMPVELSNYNDILPRIAHWKKEAEELTRQIETISRSIKSAATKVAKDKNIRKRHYLTLKRDYILGKYERFTWEEPKVGFKNSQIPDTGIITKYAQAYLKSYFKRVESVKGGAVAEFRKLWGIQESFIDENWWKHYKDKDRDKHTHHTIDAITIACMPKDKYDLLAHAWRLEDEQDKKAAKVLIEQAKPWKTFKEDIEKIETEILVSHFTPDNVKKQSKSIIKNRGKKVYVLKNELPVNFKNKIEGKDYFKLKFDSKILYKIPKKKEKQTDTFYEELPKNYLNGVEGKDYFKINTTGKTFYKIPIFNQGDTIRGSLHQETTYGAIKLPDIDIETKKPLHTDKGGFILKKDIKGNEIVFFVVRKEISKISENDVQNIVDNVVRKKIENAIANSLITFKIVKKKKVAVIKEGVTIWMREPNIEKGIEGIPIKKVRIITNSVKNPIEIKVHSPLSKSRHKHKQKVYGQNDENYAMALYELDGKREFELINNFNLAKLLKQSQSYYPLHKEKEIKGKKILVPIEKRNNKDVILKRGQQVVFYDKTVENPKDISEIIDFRERIYIIEGLTIQRQKDKKTSKVNEYGIIQLRHFKEARKSEEISKDNFKPDGEFKINENKPTRKMNHNQFTAFVEGIDFKVLPSGKFQKI

SEQ ID NO: 747 - protein, 1052 aa, Aminomonas paucivorans DSM 12260
MIGEHVRGGCLFDDHWTPNWGAFRLPNTVRTFTKAENPKDGSSLAEPRRQARGLRRRLRRKTQRLEDLRRLLAKEGVLSLSDLETLFRETPAKDPYQLRAEGLDRPLSFPEWVRVLYHITKHRGFQSNRRNPVEDGQERSRQEEEGKLLSGVGENERLLREGGYRTAGEMLARDPKFQDHRRNRAGDYSHTLSRSLLLEEARRLFQSQRTLGNPHASSNLEEAFLHLVAFQNPFASGEDIRNKAGHCSLEPDQIRAPRRSASAETFMLLQKTGNLRLIHRRTGEERPLTDKEREQIHLLAWKQEKVTHKTLRRHLEIPEEWLFTGLPYHRSGDKAEEKLFVHLAGIHEIRKALDKGPDPAVWDTLRSRRDLLDSIADTLTFYKNEDEILPRLESLGLSPENARALAPLSFSGTAHLSLSALGKLLPHLEEGKSYTQARADAGYAAPPPDRHPKLPPLEEADWRNPVVFRALTQTRKVVNALVRRYGPPWCIHLETARELSQPAKVRRRIETEQQANEKKKQQAEREFLDIVGTAPGPGDLLKMRLWREQGGFCPYCEEYLNPTRLAEPGYAEMDHILPYSRSLDNGWHNRVLVHGKDNRDKGNRTPFEAFGGDTARWDRLVAWVQASHLSAPKKRNLLREDFGEEAERELKDRNLTDTRFITKTAATLLRDRLTFHPEAPKDPVMTLNGRLTAFLRKQWGLHKNRKNGDLHHALDAAVLAVASRSFVYRLSSHNAAWGELPRGREAENGFSLPYPAFRSEVLARLCPTREEILLRLDQGGVGYDEAFRNGLRPVFVSRAPSRRLRGKAHMETLRSPKWKDHPEGPRTASRIPLKDLNLEKLERMVGKDRDRKLYEALRERLAAFGGNGKKAFVAPFRKPCRSGEGPLVRSLRIFDSGYSGVELRDGGEVYAVADHESMVRVDVYAKKNRFYLVPVYVADVARGIVKNRAIVAHKSEEEWDLVDGSFDFRFSLFPGDLVEIEKKDGAYLGYYKSCHRGDGRLLLDRHDRMPRESDCGTFYVSTRKDVLSMSKYQVDPLGEIRLVGSEKPPFVL

SEQ ID NO: 748 - protein, 1173 aa, Rhodospirillum rubrum ATCC 11170
MRPIEPWILGLDIGTDSLGWAVFSCEEKGPPTAKELLGGGVRLFDSGRDAKDHTSRQAERGAFRRARRQTRTWPWRRDRLIALFQAAGLTPPAAETRQIALALRREAVSRPLAPDALWAALLHLAHHRGFRSNRIDKRERAAAKALAKAKPAKATAKATAPAKEADDEAGFWEGAEAALRQRMAASGAPTVGALLADDLDRGQPVRMRYNQSDRDGVVAPTRALIAEELAEIVARQSSAYPGLDWPAVTRLVLDQRPLRSKGAGPCAFLPGEDRALRALPTVQDFIIRQTLANLRLPSTSADEPRPLTDEEHAKALALLSTARFVEWPALRRALGLKRGVKFTAETERNGAKQAARGTAGNLTEAILAPLIPGWSGWDLDRKDRVFSDLWAARQDRSALLALIGDPRGPTRVTEDETAEAVADAIQIVLPTGRASLSAKAARAIAQAMAPGIGYDEAVTLALGLHHSHRPRQERLARLPYYAAALPDVGLDGDPVGPPPAEDDGAAAEAYYGRIGNISVHIALNETRKIVNALLHRHGPILRLVMVETTRELKAGADERKRMIAEQAERERENAEIDVELRKSDRWMANARERRQRVRLARRQNNLCPYTSTPIGHADLLGDAYDIDHVIPLARGGRDSLDNMVLCQSDANKTKGDKTPWEAFHDKPGWIAQRDDFLARLDPQTAKALAWRFADDAGERVARKSAEDEDQGFLPRQLTDTGYIARVALRYLSLVTNEPNAVVATNGRLTGLLRLAWDITPGPAPRDLLPTPRDALRDDTAARRFLDGLTPPPLAKAVEGAVQARLAALGRSRVADAGLADALGLTLASLGGGGKNRADHRHHFIDAAMIAVTTRGLINQINQASGAGRILDLRKWPRTNFEPPYPTFRAEVMKQWDHIHPSIRPAHRDGGSLHAATVFGVRNRPDARVLVQRKPVEKLFLDANAKPLPADKIAEIIDGFASPRMAKRFKALLARYQAAHPEVPPALAALAVARDPAFGPRGMTANTVIAGRSDGDGEDAGLITPFRANPKAAVRTMGNAVYEVWEIQVKGRPRWTHRVLTRFDRTQPAPPPPPENARLVMRLRRGDLVYWPLESGDRLFLVKKMAVDGRLALWPARLATGKATALYAQLSCPNINLNGDQGYCVQSAEGIRKEKIRTTSCTALGRLRLSKKAT

SEQ ID NO: 749 - protein, 1035 aa, Candidatus Puniceispirillum marinum IMCC1322
MRRLGLDLGTNSIGWCLLDLGDDGEPVSIFRTGARIFSDGRDPKSLGSLKATRREARLTRRRRDRFIQRQKNLINALVKYGLMPADEIQRQALAYKDPYPIRKKALDEAIDPYEMGRAIFHINQRRGFKSNRKSADNEAGVVKQSIADLEMKLGEAGARTIGEFLADRQATNDTVRARRLSGTNALYEFYPDRYMLEQEFDTLWAKQAAFNPSLYIEAARERLKEIVFFQRKLKPQEVGRCIFLSDEDRISKALPSFQRFRIYQELSNLAWIDHDGVAHRITASLALRDHLFDELEHKKKLTFKAMRAILRKQGVVDYPVGFNLESDNRDHLIGNLTSCIMRDAKKMIGSAWDRLDEEEQDSFILMLQDDQKGDDEVRSILTQQYGLSDDVAEDCLDVRLPDGHGSLSKKAIDRILPVLRDQGLIYYDAVKEAGLGEANLYDPYAALSDKLDYYGKALAGHVMGASGKFEDSDEKRYGTISNPTVHIALNQVRAVVNELIRLHGKPDEVVIEIGRDLPMGADGKRELERFQKEGRAKNERARDELKKLGHIDSRESRQKFQLWEQLAKEPVDRCCPFTGKMMSISDLFSDKVEIEHLLPFSLTLDDSMANKTVCFRQANRDKGNRAPFDAFGNSPAGYDWQEILGRSQNLPYAKRWRFLPDAMKRFEADGGFLERQLNDTRYISRYTTEYISTIIPKNKIWVVTGRLTSLLRGFWGLNSILRGHNTDDGTPAKKSRDDHRHHAIDAIVVGMTSRGLLQKVSKAARRSEDLDLTRLFEGRIDPWDGFRDEVKKHIDAIIVSHRPRKKSQGALHNDTAYGIVEHAENGASTVVHRVPITSLGKQSDIEKVRDPLIKSALLNETAGLSGKSFENAVQKWCADNSIKSLRIVETVSIIPITDKEGVAYKGYKGDGNAYMDIYQDPTSSKWKGEIVSRFDANQKGFIPSWQSQFPTARLIMRLRINDLLKLQDGEIEEIYRVQRLSGSKILMAPHTEANVDARDRDKNDTFKLTSKSPGKLQSASARKVHISPTGLIREG

SEQ ID NO: 750 - protein, 1068 aa, Verminephrobacter eiseniae EF01-2
MNKAVAYRLALDLGSTSLGWAIFRLNEAREPTAIIRAGVRIFSDGRNANSEPLAVHRRVARAMRRRRDRLLKRKKRMHDQLVQHGFFPAEVAERKELERLNPYQLRAKGLHEALTPGEFARALFHINQRRGFKSNRKTDRKDNDSGALKQAISELRKRIQDSDCATAGEWFWKERMQQKPEGVRGQWVRARYRKTPSTTDEGKKRIGYDLYVDRAMVEQEFDALWAAQAALQPGLFTEAARAELKDTLLYQRDLRPVKPGRCTLLPAEERAPLALPSTQRFRILQEVNNLRLLDEALREVPLNLAQRDAVVSALEGKKELSFAAIRKLLTLSGKFNLEDEKRAELKGNATSVILARKDLFGDAWAGFDAAVQDEIVWRLVSQESEGALIAWLQQHTGVDGVCAEAIVNTRLPDGYGRLSRKALERIVPALQREVCTYDKAVQAAGFAHHSDLGFDFDYAEDEVQQVGEHTIASTGEVQAQYAFKQLPYYGKALQRHVAFGSGDAKDHEEKCYGKIANPTVHIGLNQVRTVVNALIRRYGHPTEVVVELARDLKQSREQKQQTQREQADNQKRNEDIRKRIAPILETSPERVRDRDIKKWILWEELNKKDIADRHCPYSGERISATMLLSEAVEIEHILPFSRTLDDSLNNRTVAMRRANRIKGDRTPWEARADFEAQGWRYEAILQRAEGMPPRKRYRFAEDGYQRWLGKDRNFLARALNDTSYLSRLAANYLRLVCPQGVRVIPGQMTDKLRGKFGLNSVLGLDGKKNRNDHRHHAVDACVIGVTDQGLMQRFANASKQARENGLTRLVQDMLLPWWPSYYDHVERAVRHIRVSHRPDHGFEGAMMKGTAHGIREDGIREDGRIKQRPKAKGSADHKTITLIPIDEPRQLARHGVDAEGKPLPYKGYASGSNYCIEITKNGKGKWEGQVISTFDAYRIKAAADAAARAGQVISTVEADSIVRKSGWERLRGAQSQNGQPLVMRLVIGDSVRMEVDGRDEVMRVVKMSGKEMVFAPVREANVDKRNNMPDEQDPFTYTYKRADQLRKAKARQVTISPIGELRDPGFKG

SEQ ID NO: 751 - protein, 1062 aa, Ralstonia syzygii R24
MAEKQHRWGLDIGTNSIGWAVIALIEGRPAGLVATGSRIFSDGRNPKDGSSLAVERRGPRQMRRRRDRYLRRRDRFMQALINVGLMPGDAAARKALVTENPYVLRQRGLDQALTLPEFGRALFHLNQRRGFQSNRKTDRATAKESGKVKNAIAAFRAGMGNARTVGEALARRLEDGRPVRARMVGQGKDEHYELYIAREWIAQEFDALWASQQRFHAEVLADAARDRLRAILLFQRKLLPVPVGKCFLEPNQPRVAAALPSAQRFRLMQELNHLRVMTLADKRERPLSFQERNDLLAQLVARPKCGFDMLRKIVFGANKEAYRFTIESERRKELKGCDTAAKLAKVNALGTRWQALSLDEQDRLVCLLLDGENDAVLADALREHYGLTDAQIDTLLGLSFEDGHMRLGRSALLRVLDALESGRDEQGLPLSYDKAVVAAGYPAHTADLENGERDALPYYGELLWRYTQDAPTAKNDAERKFGKIANPTVHIGLNQLRKLVNALIQRYGKPAQIVVELARNLKAGLEEKERIKKQQTANLERNERIRQKLQDAGVPDNRENRLRMRLFEELGQGNGLGTPCIYSGRQISLQRLFSNDVQVDHILPFSKTLDDSFANKVLAQHDANRYKGNRGPFEAFGANRDGYAWDDIRARAAVLPRNKRNRFAETAMQDWLHNETDFLARQLTDTAYLSRVARQYLTAICSKDDVYVSPGRLTAMLRAKWGLNRVLDGVMEEQGRPAVKNRDDHRHHAIDAVVIGATDRAMLQQVATLAARAREQDAERLIGDMPTPWPNFLEDVRAAVARCVVSHKPDHGPEGGLHNDTAYGIVAGPFEDGRYRVRHRVSLFDLKPGDLSNVRCDAPLQAELEPIFEQDDARAREVALTALAERYRQRKVWLEELMSVLPIRPRGEDGKTLPDSAPYKAYKGDSNYCYELFINERGRWDGELISTFRANQAAYRRFRNDPARFRRYTAGGRPLLMRLCINDYIAVGTAAERTIFRVVKMSENKITLAEHFEGGTLKQRDADKDDPFKYLTKSPGALRDLGARRIFVDLIGRVLDPGIKGD

SEQ ID NO: 752 - protein, 1079 aa, Dinoroseobacter shibae DFL 12
MRLGLDIGTSSIGWWLYETDGAGSDARITGVVDGGVRIFSDGRDPKSGASLAVDRRAARAMRRRRDRYLRRRATLMKVLAETGLMPADPAEAKALEALDPFALRAAGLDEPLPLPHLGRALFHLNQRRGFKSNRKTDRGDNESGKIKDATARLDMEMMANGARTYGEFLHKRRQKATDPRHVPSVRTRLSIANRGGPDGKEEAGYDFYPDRRHLEEEFHKLWAAQGAHHPELTETLRDLLFEKIFFQRPLKEPEVGLCLFSGHHGVPPKDPRLPKAHPLTQRRVLYETVNQLRVTADGREARPLTREERDQVIHALDNKKPTKSLSSMVLKLPALAKVLKLRDGERFTLETGVRDAIACDPLRASPAHPDRFGPRWSILDADAQWEVISRIRRVQSDAEHAALVDWLTEAHGLDRAHAEATAHAPLPDGYGRLGLTATTRILYQLTADVVTYADAVKACGWHHSDGRTGECFDRLPYYGEVLERHVIPGSYHPDDDDITRFGRITNPTVHIGLNQLRRLVNRIIETHGKPHQIVVELARDLKKSEEQKRADIKRIRDTTEAAKKRSEKLEELEIEDNGRNRMLLRLWEDLNPDDAMRRFCPYTGTRISAAMIFDGSCDVDHILPYSRTLDDSFPNRTLCLREANRQKRNQTPWQAWGDTPHWHAIAANLKNLPENKRWRFAPDAMTRFEGENGFLDRALKDTQYLARISRSYLDTLFTKGGHVWVVPGRFTEMLRRHWGLNSLLSDAGRGAVKAKNRTDHRHHAIDAAVIAATDPGLLNRISRAAGQGEAAGQSAELIARDTPPPWEGFRDDLRVRLDRIIVSHRADHGRIDHAARKQGRDSTAGQLHQETAYSIVDDIHVASRTDLLSLKPAQLLDEPGRSGQVRDPQLRKALRVATGGKTGKDFENALRYFASKPGPYQAIRRVRIIKPLQAQARVPVPAQDPIKAYQGGSNHLFEIWRLPDGEIEAQVITSFEAHTLEGEKRPHPAAKRLLRVHKGDMVALERDGRRVVGHVQKMDIANGLFIVPHNEANADTRNNDKSDPFKWIQIGARPAIASGIRRVSVDEIGRLRDGGTRPI

SEQ ID NO: 753 - protein, 1168 aa, Azospirillum sp- B510
MARPAFRAPRREHVNGWTPDPHRISKPFFILVSWHLLSRVVIDSSSGCFPGTSRDHTDKFAEWECAVQPYRLSFDLGTNSIGWGLLNLDRQGKPREIRALGSRIFSDGRDPQDKASLAVARRLARQMRRRRDRYLTRRTRLMGALVRFGLMPADPAARKRLEVAVDPYLARERATRERLEPFEIGRALFHLNQRRGYKPVRTATKPDEEAGKVKEAVERLEAAIAAAGAPTLGAWFAWRKTRGETLRARLAGKGKEAAYPFYPARRMLEAEFDTLWAEQARHHPDLLTAEAREILRHRIFHQRPLKPPPVGRCTLYPDDGRAPRALPSAQRLRLFQELASLRVIHLDLSERPLTPAERDRIVAFVQGRPPKAGRKPGKVQKSVPFEKLRGLLELPPGTGFSLESDKRPELLGDETGARIAPAFGPGWTALPLEEQDALVELLLTEAEPERAIAALTARWALDEATAAKLAGATLPDFHGRYGRRAVAELLPVLERETRGDPDGRVRPIRLDEAVKLLRGGKDHSDFSREGALLDALPYYGAVLERHVAFGTGNPADPEEKRVGRVANPTVHIALNQLRHLVNAILARHGRPEEIVIELARDLKRSAEDRRREDKRQADNQKRNEERKRLILSLGERPTPRNLLKLRLWEEQGPVENRRCPYSGETISMRMLLSEQVDIDHILPFSVSLDDSAANKVVCLREANRIKRNRSPWEAFGHDSERWAGILARAEALPKNKRWRFAPDALEKLEGEGGLRARHLNDTRHLSRLAVEYLRCVCPKVRVSPGRLTALLRRRWGIDAILAEADGPPPEVPAETLDPSPAEKNRADHRHHALDAVVIGCIDRSMVQRVQLAAASAEREAAAREDNIRRVLEGFKEEPWDGFRAELERRARTIVVSHRPEHGIGGALHKETAYGPVDPPEEGFNLVVRKPIDGLSKDEINSVRDPRLRRALIDRLAIRRRDANDPATALAKAAEDLAAQPASRGIRRVRVLKKESNPIRVEHGGNPSGPRSGGPFHKLLLAGEVHHVDVALRADGRRWVGHWVTLFEAHGGRGADGAAAPPRLGDGERFLMRLHKGDCLKLEHKGRVRVMQVVKLEPSSNSVVVVEPHQVKTDRSKHVKISCDQLRARGARRVTVDPLGRVRVHAPGARVGIGGDAGRTAMEPAEDIS

SEQ ID NO: 754 - protein, 1166 aa, Nitrobacter hamburgensis X14
MHVEIDFPHFSRGDSHLAMNKNEILRGSSVLYRLGLDLGSNSLGWFVTHLEKRGDRHEPVALGPGGVRIFPDGRDPQSGTSNAVDRRMARGARKRRDRFVERRKELIAALIKYNLLPDDARERRALEVLDPYALRKTALTDTLPAHHVGRALFHLNQRRGFQSNRKTDSKQSEDGAIKQAASRLATDKGNETLGVFFADMHLRKSYEDRQTAIRAELVRLGKDHLTGNARKKIWAKVRKRLFGDEVLPRADAPHGVRARATITGTKASYDYYPTRDMLRDEFNAIWAGQSAHHATITDEARTEIEHIIFYQRPLKPAIVGKCTLDPATRPFKEDPEGYRAPWSHPLAQRFRILSEARNLEIRDTGKGSRRLTKEQSDLVVAALLANREVKFDKLRTLLKLPAEARFNLESDRRAALDGDQTAARLSDKKGFNKAWRGFPPERQIAIVARLEETEDENELIAWLEKECALDGAAAARVANTTLPDGHCRLGLRAIKKIVPIMQDGLDEDGVAGAGYHIAAKRAGYDHAKLPTGEQLGRLPYYGQWLQDAVVGSGDARDQKEKQYGQFPNPTVHIGLGQLRRVVNDLIDKYGPPTEISIEFTRALKLSEQQKAERQREQRRNQDKNKARAEELAKFGRPANPRNLLKMRLWEELAHDPLDRKCVYTGEQISIERLLSDEVDIDHILPVAMTLDDSPANKIICMRYANRHKRKQTPSEAFGSSPTLQGHRYNWDDIAARATGLPRNKRWRFDANAREEFDKRGGFLARQLNETGWLARLAKQYLGAVTDPNQIWVVPGRLTSMLRGKWGLNGLLPSDNYAGVQDKAEEFLASTDDMEFSGVKNRADHRHHAIDGLVTALTDRSLLWKMANAYDEEHEKFVIEPPWPTMRDDLKAALEKMVVSHKPDHGIEGKLHEDSAYGFVKPLDATGLKEEEAGNLVYRKAIESLNENEVDRIRDIQLRTIVRDHVNVEKTKGVALADALRQLQAPSDDYPQFKHGLRHVRILKKEKGDYLVPIANRASGVAYKAYSAGENFCVEVFETAGGKWDGEAVRRFDANKKNAGPKIAHAPQWRDANEGAKLVMRIHKGDLIRLDHEGRARIMVVHRLDAAAGRFKLADHNETGNLDKRHATNNDIDPFRWLMASYNTLKKLAAVPVRVDELGRVWRVMPN

SEQ ID NO: 755 - protein, 1064 aa, Bradyrhizobium sp- BTAi1
MKRTSLRAYRLGVDLGANSLGWFVVWLDDHGQPEGLGPGGVRIFPDGRNPQSKQSNAAGRRLARSARRRRDRYLQRRGKLMGLLVKHGLMPADEPARKRLECLDPYGLRAKALDEVLPLHHVGRALFHLNQRRGLFANRAIEQGDKDASAIKAAAGRLQTSMQACGARTLGEFLNRRHQLRATVRARSPVGGDVQARYEFYPTRAMVDAEFEAIWAAQAPHHPTMTAEAHDTIREAIFSQRAMKRPSIGKCSLDPATSQDDVDGFRCAWSHPLAQRFRIWQDVRNLAVVETGPTSSRLGKEDQDKVARALLQTDQLSFDEIRGLLGLPSDARFNLESDRRDHLKGDATGAILSARRHFGPAWHDRSLDRQIDIVALLESALDEAAIIASLGTTHSLDEAAAQRALSALLPDGYCRLGLRAIKRVLPLMEAGRTYAEAASAAGYDHALLPGGKLSPTGYLPYYGQWLQNDVVGSDDERDTNERRWGRLPNPTVHIGIGQLRRVVNELIRWHGPPAEITVELTRDLKLSPRRLAELEREQAENQRKNDKRTSLLRKLGLPASTHNLLKLRLWDEQGDVASECPYTGEAIGLERLVSDDVDIDHLIPFSISWDDSAANKVVCMRYANREKGNRTPFEAFGHRQGRPYDWADIAERAARLPRGKRWRFGPGARAQFEELGDFQARLLNETSWLARVAKQYLAAVTHPHRIHVLPGRLTALLRATWELNDLLPGSDDRAAKSRKDHRHHAIDALVAALTDQALLRRMANAHDDTRRKIEVLLPWPTFRIDLETRLKAMLVSHKPDHGLQARLHEDTAYGTVEHPETEDGANLVYRKTFVDISEKEIDRIRDRRLRDLVRAHVAGERQQGKTLKAAVLSFAQRRDIAGHPNGIRHVRLTKSIKPDYLVPIRDKAGRIYKSYNAGENAFVDILQAESGRWIARATTVFQANQANESHDAPAAQPIMRVFKGDMLRIDHAGAEKFVKIVRLSPSNNLLYLVEHHQAGVFQTRHDDPEDSFRWLFASFDKLREWNAELVRIDTLGQPWRRKRGLETGSEDATRIGWTRPKKWP

SEQ ID NO: 756 - protein, 1059 aa, Wolinella succinogenes DSM 1740
MIERILGVDLGISSLGWAIVEYDKDDEAANRIIDCGVRLFTAAETPKKKESPNKARREARGIRRVLNRRRVRMNMIKKLFLRAGLIQDVDLDGEGGMFYSKANRADVWELRHDGLYRLLKGDELARVLIHIAKHRGYKFIGDDEADEESGKVKKAGVVLRQNFEAAGCRTVGEWLWRERGANGKKRNKHGDYEISIHRDLLVEEVEAIFVAQQEMRSTIATDALKAAYREIAFFVRPMQRIEKMVGHCTYFPEERRAPKSAPTAEKFIAISKFFSTVIIDNEGWEQKIIERKTLEELLDFAVSREKVEFRHLRKFLDLSDNEIFKGLHYKGKPKTAKKREATLFDPNEPTELEFDKVEAEKKAWISLRGAAKLREALGNEFYGRFVALGKHADEATKILTYYKDEGQKRRELTKLPLEAEMVERLVKIGFSDFLKLSLKAIRDILPAMESGARYDEAVLMLGVPHKEKSAILPPLNKTDIDILNPTVIRAFAQFRKVANALVRKYGAFDRVHFELAREINTKGEIEDIKESQRKNEKERKEAADWIAETSFQVPLTRKNILKKRLYIQQDGRCAYTGDVIELERLFDEGYCEIDHILPRSRSADDSFANKVLCLARANQQKTDRTPYEWFGHDAARWNAFETRTSAPSNRVRTGKGKIDRLLKKNFDENSEMAFKDRNLNDTRYMARAIKTYCEQYWVFKNSHTKAPVQVRSGKLTSVLRYQWGLESKDRESHTHHAVDAIIIAFSTQGMVQKLSEYYRFKETHREKERPKLAVPLANFRDAVEEATRIENTETVKEGVEVKRLLISRPPRARVTGQAHEQTAKPYPRIKQVKNKKKWRLAPIDEEKFESFKADRVASANQKNFYETSTIPRVDVYHKKGKFHLVPIYLHEMVLNELPNLSLGTNPEAMDENFFKFSIFKDDLISIQTQGTPKKPAKIIMGYFKNMHGANMVLSSINNSPCEGFTCTPVSMDKKHKDKCKLCPEENRIAGRCLQGFLDYWSQEGLRPPRKEFECDQGVKFALDVKKYQIDPLGYYYEVKQEKRLGTIPQMRSAKKLVKK

SEQ ID NO: 757 - protein, 984 aa, Campylobacter jejuni subsp. jejuni NCTC 11168
MARILAFDIGISSIGWAFSENDELKDCGVRIFTKVENPKTGESLALPRRLARSARKRLARRKARLNHLKHLIANEFKLNYEDYQSFDESLAKAYKGSLISPYELRFRALNELLSKQDFARVILHIAKRRGYDDIKNSDDKEKGAILKAIKQNEEKLANYQSVGEYLYKEYFQKFKENSKEFTNVRNKKESYERCIAQSFLKDELKLIFKKQREFGFSFSKKFEEEVLSVAFYKRALKDFSHLVGNCSFFTDEKRAPKNSPLAFMFVALTRIINLLNNLKNTEGILYTKDDLNALLNEVLKNGTLTYKQTKKLLGLSDDYEFKGEKGTYFIEFKKYKEFIKALGEHNLSQDDLNEIAKDITLIKDEIKLKKALAKYDLNQNQIDSLSKLEFKDHLNISFKALKLVTPLMLEGKKYDEACNELNLKVAINEDKKDFLPAFNETYYKDEVTNPVVLRAIKEYRKVLNALLKKYGKVHKINIELAREVGKNHSQRAKIEKEQNENYKAKKDAELECEKLGLKINSKNILKLRLFKEQKEFCAYSGEKIKISDLQDEKMLEIDHIYPYSRSFDDSYMNKVLVFTKQNQEKLNQTPFEAFGNDSAKWQKIEVLAKNLPTKKQKRILDKNYKDKEQKNFKDRNLNDTRYIARLVLNYTKDYLDFLPLSDDENTKLNDTQKGSKVHVEAKSGMLTSALRHTWGFSAKDRNNHLHHAIDAVIIAYANNSIVKAFSDFKKEQESNSAELYAKKISELDYKNKRKFFEPFSGFRQKVLDKIDEIFVSKPERKKPSGALHEETFRKEEEFYQSYGGKEGVLKALELGKIRKVNGKIVKNGDMFRVDIFKHKKTNKFYAVPIYTMDFALKVLPNKAVARSKKGEIKDWILMDENYEFCFSLYKDSLILIQTKDMQEPEFVYYNAFTSSTVSLIVSKHDNKFETLSKNQKILFKNANEKEVIAKSIGIQNLKVFEKYIVSALGEVTKAEFRQREDFKK

SEQ ID NO: 758 - protein, 1024 aa, Helicobacter mustelae 12198
MIRTLGIDIGIASIGWAVIEGEYTDKGLENKEIVASGVRVFTKAENPKNKESLALPRTLARSARRRNARKKGRIQQVKHYLSKALGLDLECFVQGEKLATLFQTSKDFLSPWELRERALYRVLDKEELARVILHIAKRRGYDDITYGVEDNDSGKIKKAIAENSKRIKEEQCKTIGEMMYKLYFQKSLNVRNKKESYNRCVGRSELREELKTIFQIQQELKSPWVNEELIYKLLGNPDAQSKQEREGLIFYQRPLKGFGDKIGKCSHIKKGENSPYRACKHAPSAEEFVALTKSINFLKNLTNRHGLCFSQEDMCVYLGKILQEAQKNEKGLTYSKLKLLLDLPSDFEFLGLDYSGKNPEKAVFLSLPSTFKLNKITQDRKTQDKIANILGANKDWEAILKELESLQLSKEQIQTIKDAKLNFSKHINLSLEALYHLLPLMREGKRYDEGVEILQERGIFSKPQPKNRQLLPPLSELAKEESYFDIPNPVLRRALSEFRKVVNALLEKYGGFHYFHIELTRDVCKAKSARMQLEKINKKNKSENDAASQLLEVLGLPNTYNNRLKCKLWKQQEEYCLYSGEKITIDHLKDQRALQIDHAFPLSRSLDDSQSNKVLCLTSSNQEKSNKTPYEWLGSDEKKWDMYVGRVYSSNFSPSKKRKLTQKNFKERNEEDFLARNLVDTGYIGRVTKEYIKHSLSFLPLPDGKKEHIRIISGSMTSTMRSFWGVQEKNRDHHLHHAQDAIIIACIEPSMIQKYTTYLKDKETHRLKSHQKAQILREGDHKLSLRWPMSNFKDKIQESIQNIIPSHHVSHKVTGELHQETVRTKEFYYQAFGGEEGVKKALKFGKIREINQGIVDNGAMVRVDIFKSKDKGKFYAVPIYTYDFAIGKLPNKAIVQGKKNGIIKDWLEMDENYEFCFSLFKNDCIKIQTKEMQEAVLAIYKSTNSAKATIELEHLSKYALKNEDEEKMFTDTDKEKNKTMTRESCGIQGLKVFQKVKLSVLGEVLEHKPRNRQNIALKTTPKHV

SEQ ID NO: 759 - protein, 1069 aa, Bacillus cereus Rock1-15
MNYDIGLRIGITSCGWSIINKDLERIEDLGVRVFEKAENPDGTASAAPRREARKSRRKHRRKKHRIERIKRLIVQHDLLSKKELDSLYLSPFNIDVWNLQVEALERKLDNREFARVLIHLVQRRGFQTIRKSVEIQEEGKLLENVSENERIMKVNGYKTVGEMFSKHEKFTHHKRNKDGSYTSVVTRSLLLKEIKTIFNSQRILGNVFSTQKLESDYLYIWGSQRPTLTYEQLMSMVGNCIYEKKEKRAPKTSWAFQYFSLLQKINKLKVSDDNTLRKLSKEERDIVIELAFKKKNVSFVDIRKALKLNDNTKFNHLTYSHVVETKKVEKATFIELKGYHLIKKQLKDRNVELTQELQPKDYDAIAAASTFFKNDIEFRDYLRNQYLDSNGKRKSNIANKVFEDKVIAAVFELNFSKVCHLSFKSLYKLIPHLEKGLDYKEAILCAGYNFRDENKRDKKLFLPVIQQETNPVVHRALTQARKVINAIIREYGSPNTIRFVVANDLAKTYKQRKELESTLKKNRAENEKIKTKLLSMGIINPTGMDIVKYKLWYEQSGICLYTGRQMELSSLFKPGYSIVNHIIPYNRSFDDTYHNRVLTLTETKYEKGNKIPFEYFGAEETCWNEYEKRVSTSKKIHDKKREKLLIRNFDIEYENEMISNNVFDTHYIGSYFEKYIDEHLQFKKSTKKQKVFSIHGNMVAHLHSRWGFNKNSREIYLNHAVDAAIVAVLTDQLIRNIADYYRRDNILEQKGSLKFPEPWKSFSIELEARISPQVRDLIKKLNLDSYLDVDILHIKPVFISKKPRRKVNGEAHKSTIRSLIGINEIGKTVTCIKTRLEDIPFDENGDFPMYGKDTDKYTYTAIKERYLEFNKDKEKAFSTPLYKLKRNGEPGNQIKSVKIIDTRNIVNKVNQGKGIAYNSNIIRVDVFSRDQKYYVVPIYLRDFIKGSLPNKIITAAKGFMQWPETDNSYTFLFSIFPNDLIKVVPKEGKFIKAKNENKENINLTEILGYFKGLDSSTGAFTLESHDGSLLARGIGTKNLLLIEKYQVDVLGRYNKVGNEERQDIKIQQN

SEQ ID NO: 760 - protein, 1131 aa, Acidovorax ebreus TPSY
MAQHVFGLDIGIASVGWAILGEQRIIDLGVRCFDKAETAKEGDPLNLTRRQARLLRRRLYRRAWRLTQLSRLLKRKGLIADAKLFAKAPSYGDSAWELRRQGLDRLLTPLEWARVIYHQCKHRGFHWTSKAEEAKADSDAEGGRVKQGLAHTKALMQAKNYRSAAEMVLAEFPDAQRNKRGQYDKALSRVLLGEELALLFATQRRLGNPHASDFFEKLILGDGDRKSGLFWQQKPALSGADLLKMLGKCTFEKGEYRAPKASFSVERHVWLTRLNNLRIVVDGRSRPLNEAERQAALLLPYQTETSKYKTLKNAFIKAGLWGDGVRFGGLAYPSQAQIDAEKTKDPEDQFLVKLPAWHELRKAFKAAGHEALWQQISTPALDGDPTLLDQIATVLSVYKDGAEVVQQLRQLALPEPAASIAVLEKISFDKFSSLSLKALRRIVPLMQSGLRYDEAVAQIPEYGHHSQRIEPGAAKHLYLPPFYEAQRKYAGKGDHIGSMQFRDDADIPRNPVVLRALNQARKVVNALIREYGSPIAVNIEMARDLSRPLDERNKVKRAQEEFRDRNDRARSEFERDFGYKPKAAAFEKWMLYREQLGQCAYSQQPLDIQRVLDDHNYAQVDHALPYSRSYDDSKNNKVLVLTHENQNKGNRTAFEYLTSFPDGEDGERWRTFVAWVQGNKAYRMAKRNRLLRKNYGVDESKGFIDRNLNDTRYICKFFKNYVEEHLQLAARADGDTARRCVVVNGQLTAFLRARWGLTKVRGDSDRHHALDAAVVAACTHGMVKALADYSRRKEISFLQEGFPDPETGEILNPAAFDRARQHFPEPWTHFAHELKARLFTDDLAALREDMQRLGSYTTEDLGRLRTLFVSRAPQRRSGGAVHKETIYAQPESLKQQGGVIEKILLTSLKLQDFDKLLNPESNDHFVEPHRNERLYAAIRQRLEQFGGRADKAFGPDNLFHKPDKNNQPTGPVVRSIKLVRGKQTGIPIRGGLAKNDSMLRVDIFTKAGKFHLVPVYVHHRVTGLPNRAIVAFKDEDEWTLIDESFAFLFSVYPNDYVKVTLKKEQQSGYYSGADRSTGAMNLWAHDRAASVGKDGLIRGIGVKTALSVEKFNVDVLGRIYLAPPETRSGLA

SEQ ID NO: 761 - protein, 1032 aa, Unknown
  Description of unknown: uncultured Termite group 1 bacterium phylotype RsD17
MKKRILGLDIGIASVGWALVEFDDEFQDNKKKGTIIKSGVRIFTRAETPKERESLAKPRREARSQRRRIRRRVERLNSIRELFVKNGVVEEWSVSKKNPNNIYITLNQIKTPWQLRMESLDRKLTNEQFAVVLTHLAKHRGYKSLRKDDKAGKVLEAISQNKKRLNDSDYRTLGEMFCKNESYKEHKRNKGGEYINSVARELIEEEVEKIFVKQREKGNNFADVNTEREYLKIAFSQKPAGSISKMVGFCTFENGEKRAPRDSYSAELFKVLCTINNTTFTDMKTGEIRSFSKEEIGKTLETVKNVKDVKYAKIRKDLGLEDSVKFSGVDYRENAKSKGEGEIFVSMKTYHEIKSKIEKLSKEKWDNLKGNTELLDSIVNIIANLKDDESIKKEFQKLKIDEDIIDVLLNFEFKKFINLSFKALRKIIPFQFQGQKYITASTSAGYSLKQEGIKNKLVPPAKENINVAVVARAFAQTRKVINAVIRKYGQFDQINIELATELKNSKFDRSKIEEGQKKFQSQKDKIFKEVQELRGGMTPSSSLLLKYRLWREQDERCVYSGRKISFEDLLDTGFLDIDHIIPYSKSMDDSFNNKVLCLAEENRNKKNDIPFNYYQRIDRDWNLLISIITSMKNMKIAKKSRLLKQELSDIEGFIERNINDTRYATRYIKDFLENNLEFKENEFIKVKVQARSGGLTSVLSYNWGMSKDREESYFHHAKDAIIVACSTQGMVQYISKISQQYENDKDKMKKIKDKTENCIPKPWDSFRADVEESIEGIFVSFAPRHKVTGSAHKETIYSKKHLEKERYVTVKKSLDKIKLSDLENIPCNENCGIIRVLKERLEKFKNDSLKAFADPVHMPTKCPNKKGPVIRSVKIKESNKTGIEVRKGLAERGEMVRVDVFIKDKKYYLVPIYVSDFKNKDLPNKAIAALKLENEWIMIDKTYSFKFSLFKDDLIKIKKKKEEIFGYFGGVHRSTGTIKIKSRHKPKEIDEGIGSRCLLDFRKFQVDVLGNYTEVKHEKRMPAYITRKDKKH

SEQ ID NO: 762 - protein, 1065 aa, Clostridium perfringens D str. JGS1721
MNKDINYALGLDIGITSVGWAVINLDLNRIEDLGVRIFNAAENLKDGSSLALPRRLARGRRRLLRRKAYRVERVRKLILKNNILTKEELEGLFKNKEVIDVWEARVKGLDYKLSREEWAKILINFCKRRGFKSNRKNEAKDKEAGQILSSISYNIEKMKETNSRTIGEYIYNEVKNSEDSYAPLRNKFGEYKMCVSRDVIREEIHTLFEKQRELGNNFASDEIEDKYFEIFNSQRPFSNFEDLEKLVGFCTFERKKHKRAPKHCISSEEFTLYEGINKLSIIKDGEKRKLSEEERTLVVNEAFNKKEIKYTTLRKLLGLSEEELFSTLTYSIDKDISKTENTKFVSLKGYHEIKRAIEKGVSKKAWQDIENNRNLLNDIAYVLTLGKTDDEIEKQLRLRNVPEELFESLLDMSFNKFNNLSIYALEKILPFMKEGYQYNEACEKAGYNFKAIYEGVRTKKLPVIEIDEIVNPVVNRALAQTRKVINSVIDKYGSPVRINIELARDLAKNFKDRKLIEKEQKENRANLDKIRENLRELMDKEPTVVEVLKYRLWEQQRGECAYTQSQIPLERLFSPGYCEIDHIIPFSRSFDDSLSNKILVLGSENQRKGNRTPYEYFGEDSERWNSFEIWVKGSYLNYKKKANLLKKKFSEEEQRDWKARNLQDTKYICRYISNFVNNRLEFKESENKQKVITVNGRATAYLRSRWGLNKVREDGDKHHALDAAVVGVTTQGMVQKISKYSKAHELYTVRKNDEFVDVETGECVDVDEYKEIRKDILPRPWRGFSEELKLRLSDNPLEELKKSPIETYNEEFIKENVKPIFVSRVPFRKISGKLFKETIYSERAFKDGYFVSKKSLVDLKRGDLDNFYNYECDKKLYDAISERMKEFNYNGKKAFESPFRKPTKSGKEGPVVRSVKIKSAVPFKDGIPMNEGLVAKEGMVRIDIYEKEGKYFVVPVYRYQLAKGIVPKRAAIAKKDELKWPIMDQTYNFKFSIYKNDLIEVKYDKKGVYFGYYDGFDRNSASLTIEKHDNSERYRSIGLKVGVLEINKYEVDVLGNYHKVKLGGN

SEQ ID NO: 763 - protein, 1021 aa, Clostridium cellulolyticum H10
MKYTLGLDVGIASVGWAVIDKDNNKIIDLGVRCFDKAEESKTGESLATARRIARGMRRRISRRSQRLRLVKKLFVQYEIIKDSSEFNRIFDTSRDGWKDPWELRYNALSRILKPYELVQVLTHITKRRGFKSNRKEDLSTTKEGVVITSIKNNSEMLRTKNYRTIGEMIFMETPENSNKRNKVDEYIHTIAREDLLNEIKYIFSIQRKLGSPFVTEKLEHDFLNIWEFQRPFASGDSILSKVGKCTLLKEELRAPTSCYTSEYFGLLQSINNLVLVEDNNTLTLNNDQRAKIIEYAHFKNEIKYSEIRKLLDIEPEILFKAHNLTHKNPSGNNESKKFYEMKSYHKLKSTLPTDIWGKLHSNKESLDNLFYCLTVYKNDNEIKDYLQANNLDYLIEYIAKLPTFNKFKHLSLVAMKRIIPFMEKGYKYSDACNMAELDFTGSSKLEKCNKLTVEPIIENVTNPVVIRALTQARKVINAIIQKYGLPYMVNIELAREAGMTRQDRDNLKKEHENNRKAREKISDLIRQNGRVASGLDILKWRLWEDQGGRCAYSGKPIPVCDLLNDSLTQIDHIYPYSRSMDDSYMNKVLVLTDENQNKRSYTPYEVWGSTEKWEDFEARIYSMHLPQSKEKRLLNRNFITKDLDSFISRNLNDTRYISRFLKNYIESYLQFSNDSPKSCVVCVNGQCTAQLRSRWGLNKNREESDLHHALDAAVIACADRKIIKEITNYYNERENHNYKVKYPLPWHSFRQDLMETLAGVFISRAPRRKITGPAHDETIRSPKHFNKGLTSVKIPLTTVTLEKLETMVKNTKGGISDKAVYNVLKNRLIEHNNKPLKAFAEKIYKPLKNGTNGAIIRSIRVETPSYTGVFRNEGKGISDNSLMVRVDVFKKKDKYYLVPIYVAHMIKKELPSKAIVPLKPESQWELIDSTHEFLFSLYQNDYLVIKTKKGITEGYYRSCHRGTGSLSLMPHFANNKNVKIDIGVRTAISIEKYNVDILGNKSIVKGEPRRGMEKYNSFKSN

SEQ ID NO: 764 - protein, 1037 aa, Parvibaculum lavamentivorans DS-1
MERIFGFDIGTTSIGFSVIDYSSTQSAGNIQRLGVRIFPEARDPDGTPLNQQRRQKRMMRRQLRRRRIRRKALNETLHEAGFLPAYGSADWPVVMADEPYELRRRGLEEGLSAYEFGRAIYHLAQHRHFKGRELEESDTPDPDVDDEKEAANERAATLKALKNEQTTLGAWLARRPPSDRKRGIHAHRNVVAEEFERLWEVQSKFHPALKSEEMRARISDTIFAQRPVFWRKNTLGECRFMPGEPLCPKGSWLSQQRRMLEKLNNLAIAGGNARPLDAEERDAILSKLQQQASMSWPGVRSALKALYKQRGEPGAEKSLKFNLELGGESKLLGNALEAKLADMFGPDWPAHPRKQEIRHAVHERLWAADYGETPDKKRVIILSEKDRKAHREAAANSFVADFGITGEQAAQLQALKLPTGWEPYSIPALNLFLAELEKGERFGALVNGPDWEGWRRTNFPHRNQPTGEILDKLPSPASKEERERISQLRNPTVVRTQNELRKVVNNLIGLYGKPDRIRIEVGRDVGKSKREREEIQSGIRRNEKQRKKATEDLIKNGIANPSRDDVEKWILWKEGQERCPYTGDQIGFNALFREGRYEVEHIWPRSRSFDNSPRNKTLCRKDVNIEKGNRMPFEAFGHDEDRWSAIQIRLQGMVSAKGGTGMSPGKVKRFLAKTMPEDFAARQLNDTRYAAKQILAQLKRLWPDMGPEAPVKVEAVTGQVTAQLRKLWTLNNILADDGEKTRADHRHHAIDALTVACTHPGMTNKLSRYWQLRDDPRAEKPALTPPWDTIRADAEKAVSEIVVSHRVRKKVSGPLHKETTYGDTGTDIKTKSGTYRQFVTRKKIESLSKGELDEIRDPRIKEIVAAHVAGRGGDPKKAFPPYPCVSPGGPEIRKVRLTSKQQLNLMAQTGNGYADLGSNHHIAIYRLPDGKADFEIVSLFDASRRLAQRNPIVQRTRADGASFVMSLAAGEAIMIPEGSKKGIWIVQGVWASGQVVLERDTDADHSTTTRPMPNPILKDDAKKVSIDPIGRVRPSND

SEQ ID NO: 765 - protein, 1140 aa, Roseburia intestinalis L1-82
MRENGSDERRRNMDEKMDYRIGLDIGIASVGWAVLQNNSDDEPVRIVDLGVRIFDTAEIPKTGESLAGPRRAARTTRRRLRRRKHRLDRIKWLFENQGLINIDDFLKRYNMAGLPDVYQLRYEALDRKLTDEELAQVLLHIAKHRGFRSTRKAETAAKENGAVLKATDENQKRMQEKGYRTVGEMIYLDEAFRTGCSWSEKGYILTPRNKAENYQHTMLRAMLVEEVKEIFSSQRRLGNEKATEELEEKYLEIMTSQRSFDLGPGMQPDGKPSPYAMEGFSDRVGKCTFLGDQGELRGAKGTYTAEYFVALQKINHTKLVNQDGETRNFTEEERRALTLLLFTQKEVKYAAVRKKLGLPEDILFYNLNYKKAATKEEQQKENQNTEKAKFIGMPYYHDYKKCLEERVKYLTENEVRDLFDEIGMILTCYKNDDSRTERLAKLGLVPIEMEGLLAYTPTKFQHLSMKAMRNIIPFLEKGMTYDKACEEAGYDFKADSKGTKQKLLTGENVNQTINEITNPVVKRSVSQTVKVINAIIRTYGSPQAINIELAREMSKTFEERRKIKGDMEKRQKNNEDVKKQIQELGKLSPTGQDILKYRLWQEQQGICMYSGKTIPLEELFKPGYDIDHILPYSITFDDSFRNKVLVTSQENRQKGNRTPYEYMGNDEQRWNEFETRVKTTIRDYKKQQKLLKKHFSEEERSEFKERNLTDTKYITTVIYNMIRQNLEMAPLNRPEKKKQVRAVNGAITAYLRKRWGLPQKNRETDTHHAMDAVVIACCTDGMIQKISRYTKVRERCYSKGTEFVDAETGEIFRPEDYSRAEWDEIFGVHIPKPWETFRAELDVRMGDDPKGFLDTHSDVALELDYPEYIYENLRPIFVSRMPNHKVTGAAHADTIRSPRHFKDEGIVLTKTALTDLKLDKDGEIDGYYNPQSDLLLYEALKKQLLLYGNDAKKAFAQDFHKPKADGTEGPVVRKVKIQKKQTMGVFVDSGNGIAENGGMVRIDVFRVNGKYYFVPVYTADVVKKVLPNRASTAHKPYGEWKVMEDKDFLFSLYSRDLIHIKSKKDIPIKMVNGGMEGIKETYAYYIGADISAANIQGIAHDSRYKFRGLGIQSLDVLEKCQIDVLGHVSVVRSEKRMGFS

SEQ ID NO: 766 - protein, 1082 aa, Neisseria meningitidis Z2491
MAAFKPNPINYILGLDIGIASVGWAMVEIDEDENPICLIDLGVRVFERAEVPKTGDSLAMARRLARSVRRLTRRRAHRLLRARRLLKREGVLQAADFDENGLIKSLPNTPWQLRAAALDRKLTPLEWSAVLLHLIKHRGYLSQRKNEGETADKELGALLKGVADNAHALQTGDFRTPAELALNKFEKESGHIRNQRGDYSHTFSRKDLQAELILLFEKQKEFGNPHVSGGLKEGIETLLMTQRPALSGDAVQKMLGHCTFEPAEPKAAKNTYTAERFIWLTKLNNLRILEQGSERPLTDTERATLMDEPYRKSKLTYAQARKLLGLEDTAFFKGLRYGKDNAEASTLMEMKAYHAISRALEKEGLKDKKSPLNLSPELQDEIGTAFSLFKTDEDITGRLKDRIQPEILEALLKHISFDKFVQISLKALRRIVPLMEQGKRYDEACAEIYGDHYGKKNTEEKIYLPPIPADEIRNPVVLRALSQARKVINGVVRRYGSPARIHIETAREVGKSFKDRKEIEKRQEENRKDREKAAAKFREYFPNFVGEPKSKDILKLRLYEQQHGKCLYSGKEINLGRLNEKGYVEIDHALPFSRTWDDSFNNKVLVLGSENQNKGNQTPYEYFNGKDNSREWQEFKARVETSRFPRSKKQRILLQKFDEDGFKERNLNDTRYVNRFLCQFVADRMRLTGKGKKRVFASNGQITNLLRGFWGLRKVRAENDRHHALDAVVVACSTVAMQQKITRFVRYKEMNAFDGKTIDKETGEVLHQKTHFPQPWEFFAQEVMIRVFGKPDGKPEFEEADTPEKLRTLLAEKLSSRPEAVHEYVTPLFVSRAPNRKMSGQGHMETVKSAKRLDEGVSVLRVPLTQLKLKDLEKMVNREREPKLYEALKARLEAHKDDPAKAFAEPFYKYDKAGNRTQQVKAVRVEQVQKTGVWVRNHNGIADNATMVRVDVFEKGDKYYLVPIYSWQVAKGILPDRAVVQGKDEEDWQLIDDSFNFKFSLHPNDLVEVITKKARMFGYFASCHRGTGNINIRIHDLDHKIGKNGILEGIGVKTALSFQKYQIDELGKEIRPCRLKKRPPVR

SEQ ID NO: 767 - protein, 1056 aa, Pasteurella multocida subsp. multocida str. Pm70
MQTTNLSYILGLDLGIASVGWAVVEINENEDPIGLIDVGVRIFERAEVPKTGESLALSRRLARSTRRLIRRRAHRLLLAKRFLKREGILSTIDLEKGLPNQAWELRVAGLERRLSAIEWGAVLLHLIKHRGYLSKRKNESQTNNKELGALLSGVAQNHQLLQSDDYRTPAELALKKFAKEEGHIRNQRGAYTHTFNRLDLLAELNLLFAQQHQFGNPHCKEHIQQYMTELLMWQKPALSGEAILKMLGKCTHEKNEFKAAKHTYSAERFVWLTKLNNLRILEDGAERALNEEERQLLINHPYEKSKLTYAQVRKLLGLSEQAIFKHLRYSKENAESATFMELKAWHAIRKALENQGLKDTWQDLAKKPDLLDEIGTAFSLYKTDEDIQQYLTNKVPNSVINALLVSLNFDKFIELSLKSLRKILPLMEQGKRYDQACREIYGHHYGEANQKTSQLLPAIPAQEIRNPVVLRTLSQARKVINAIIRQYGSPARVHIETGRELGKSFKERREIQKQQEDNRTKRESAVQKFKELFSDFSSEPKSKDILKFRLYEQQHGKCLYSGKEINIHRLNEKGYVEIDHALPFSRTWDDSFNNKVLVLASENQNKGNQTPYEWLQGKINSERWKNFVALVLGSQCSAAKKQRLLTQVIDDNKFIDRNLNDTRYIARFLSNYIQENLLLVGKNKKNVFTPNGQITALLRSRWGLIKARENNNRHHALDAIVVACATPSMQQKITRFIRFKEVHPYKIENRYEMVDQESGEIISPHFPEPWAYFRQEVNIRVFDNHPDTVLKEMLPDRPQANHQFVQPLFVSRAPTRKMSGQGHMETIKSAKRLAEGISVLRIPLTQLKPNLLENMVNKEREPALYAGLKARLAEFNQDPAKAFATPFYKQGGQQVKAIRVEQVQKSGVLVRENNGVADNASIVRTDVFIKNNKFFLVPIYTWQVAKGILPNKAIVAHKNEDEWEEMDEGAKFKFSLFPNDLVELKTKKEYFFGYYIGLDRATGNISLKEHDGEISKGKDGVYRVGVKLALSFEKYQVDELGKNRQICRPQQRQPVR

SEQ ID NO: 768 - protein, 1422 aa, Sutterella wadsworthensis 3 1 45B
MTQSERRFSCSIGIDMGAKYTGVFYALFDREELPTNLNSKAMTLVMPETGPRYVQAQRTAVRHRLRGQKRYTLARKLAFLVVDDMIKKQEKRLTDEEWKRGREALSGLLKRRGYSRPNADGEDLTPLENVRADVFAAHPAFSTYFSEVRSLAEQWEEFTANISNVEKFLGDPNIPADKEFIEFAVAEGLIDKTEKKAYQSALSTLRANANVLTGLRQMGHKPRSEYFKAIEADLKKDSRLAKINEAFGGAERLARLLGNLSNLQLRAERWYFNAPDIMKDRGWEPDRFKKTLVRAFKFFHPAKDQNKQHLELIKQIENSEDIIETLCTLDPNRTIPPYEDQNNRRPPLDQTLLLSPEKLTRQYGEIWKTWSARLTSAEPTLAPAAEILERSTDRKSRVAVNGHEPLPTLAYQLSYALQRAFDRSKALDPYALRALAAGSKSNKLTSARTALENCIGGQNVKTFLDCARRYYREADDAKVGLWFDNADGLLERSDLHPPMKKKILPLLVANILQTDETTGQKFLDEIWRKQIKGRETVASRCARIETVRKSFGGGFNIAYNTAQYREVNKLPRNAQDKELLTIRDRVAETADFIAANLGLSDEQKRKFANPFSLAQFYTLIETEVSGFSATTLAVHLENAWRMTIKDAVINGETVRAAQCSRLPAETARPFDGLVRRLVDRQAWEIAKRVSTDIQSKVDFSNGIVDVSIFVEENKFEFSASVADLKKNKRVKDKMLSEAEKLETRWLIKNERIKKASRGTCPYTGDRLAEGGEIDHILPRSLIKDARGIVFNAEPNLIYASSRGNQLKKNQRYSLSDLKANYRNEIFKTSNIAAITAEIEDVVTKLQQTHRLKFFDLLNEHEQDCVRHALFLDDGSEARDAVLELLATQRRTRVNGTQIWMIKNLANKIREELQNWCKTTNNRLHFQAAATNVSDAKNLRLKLAQNQPDFEKPDIQPIASHSIDALCSFAVGSADAERDQNGFDYLDGKTVLGLYPQSCEVIHLQAKPQEEKSHFDSVAIFKEGIYAEQFLPIFTLNEKIWIGYETLNAKGERCGAIEVSGKQPKELLEMLAPFFNKPVGDLSAHATYRILKKPAYEFLAKAALQPLSAEEKRLAALLDALRYCTSRKSLMSLFMAANGKSLKKREDVLKPKLFQLKVELKGEKSFKLNGSLTLPVKQDWLRICDSPELADAFGKPCSADELTSKLARIWKRPVMRDLAHAPVRREFSLPAIDNPSGGFRIRRTNLFGNELYQVHAINAKKYRGFASAGSNVDWSKGILFNELQHENLTECGGRFITSADVTPMSEWRKVVAEDNLSIWIAPGTEGRRYVRVETTFIQASHWFEQSVENWAITSPLSLPASFKVDKPAEFQKAVGTELSELLGQPRSEIFIENVGNAKHIRFWYIVVSSNKKMNESYNNVSKS

SEQ ID NO: 769 - protein, 1397 aa, gamma proteobacterium HTCC5015
MTKNYISPIAIDLGAKFTGVALYQYLEGADCTQEVAKGLLVDDRGNVTWSQEGRRGKRHQVRGYKRRKMAKRLLWLILDSEYGIKREEVTEPLLKFINGLLNRRGYTYISEEVDEESMNVSPLPFSEMMPDYFNSSAPLLEQLAKLLSDKNKLVRFRAEGKIPSNKNEFKKLLDTALDGKYKDEKKELSEAWGNILIASENVLKSTVDGHKSRSEYLANIKEDIKSNEELEKQISSKEIDGFYNLVGHLSNFQLRLLRKYFNDPNMSGVSYWDEKRLEKYFYQWVQGWHTKGGTDEAEKKNIILKTKGAPLLKTLKSLSADLTIPPYEDQNNRRPPKCQSVLLSDEKLTMHYPKWKEWVGQLVKQNDNAYLNENVTLANALHRIVERSRSIDPYQLRLLISITDAEKRNDLAGYKRLKLSLGSEVDEFLLLVKNIVDETKEAREGLWFETENKLFFKCGKTPPRKEKLKSTLLSAVLGKNLSDDEQSSFIEEFWKSGTPKIERRNVRGWCRLASQVQKTYGVYLKEYGLQQLHKLEAGKKLDDKPLALLYKNSGLIASKIGEALNIEPDEVSRFASPHSLAQIFNIIEGDVAGFNKTCRACTYENIWRMQEEKVESLLTNQLLSEIHGERKVPLKSAMCTRLSADSTRPFDGQMASIIEHIARKIAQHKIAQINDVPKEFSIDIPIIIESNQFSFTAELEEIKRGRGSAKAKKAKELGEKSKAGWVSKTERIKTSSEGICPYTGAPLGGSGEIDHIIPRSLTGRTKKTVFNSEANLIYCSSKGNHDKGNRVYVIEQLNDKYLKKQFSTSDVNLIKKKIKTTIQRFTEGGEKLRSFSELSREDQKAFRHALFVPELKSEVTSLLAVKNITRVNGTQAWLAKKIASLLAEHLDKQGRDYTLSAHQIDPWSVSKQRKMLASAEPIWAKKDPQPAASHVVDAVCTFLEALEQPHTASRLKTISSTSFEKTGWRSALIPDLIKVDALDRRPKYRRYNIGSTSLFKDGIYAERFLPILIDENGLMAGYDIDNSLKAKGADVVFESLSPFLLFKGEEVGAQSLSDWQERIDGRYLYMSIDKVKAFDYLQEKVGEKDIAAELLNSIHFTQRKTELRAKFSDDSGKKMKTLDAIRKSLKLTVTVNEIGKRKEKCGFSGTIGIPAKSAWENLLDEPLLETYWGTKMPPQEIWEKVYRKHFPRNIPNQAHRKVRKDFSLPVVDSVSGGFRVKRKTPNGYNYQLLAIDGYSAVGFKKEGDNVDFKSPALVPQIAESKSVTPISSELVHLDKNEIVYFDEWRKIDISDSDLKQFVSSLELAPGSQNRFYIRFTVDEDQFERHFKSALRVNGIQDLDTVNKTFDWNREIPSLLIPPRSNLFLLETGQKITFEYIANGANAEVKKAYSLRRA

SEQ ID NO: 770 - protein, 1372 aa, Legionella pneumophila str. Paris
MESSQILSPIGIDLGGKFTGVCLSHLEAFAELPNHANTKYSVILIDHNNFQLSQAQRRATRHRVRNKKRNQFVKRVALQLFQHILSRDLNAKEETALCHYLNNRGYTYVDTDLDEYIKDETTINLLKELLPSESEHNFIDWFLQKMQSSEFRKILVSKVEEKKDDKELKNAVKNIKNFITGFEKNSVEGHRHRKVYFENIKSDITKDNQLDSIKKKIPSVCLSNLLGHLSNLQWKNLHRYLAKNPKQFDEQTFGNEFLRMLKNFRHLKGSQESLAVRNLIQQLEQSQDYISILEKTPPEITIPPYEARTNTGMEKDQSLLLNPEKLNNLYPNWRNLIPGIIDAHPFLEKDLEHTKLRDRKRIISPSKQDEKRDSYILQRYLDLNKKIDKFKIKKQLSFLGQGKQLPANLIETQKEMETHFNSSLVSVLIQIASAYNKEREDAAQGIWFDNAFSLCELSNINPPRKQKILPLLVGAILSEDFINNKDKWAKFKIFWNTHKIGRTSLKSKCKEIEEARKNSGNAFKIDYEEALNHPEHSNNKALIKIIQTIPDIIQAIQSHLGHNDSQALIYHNPFSLSQLYTILETKRDGFHKNCVAVTCENYWRSQKTEIDPEISYASRLPADSVRPFDGVLARMMQRLAYEIAMAKWEQIKHIPDNSSLLIPIYLEQNRFEFEESFKKIKGSSSDKTLEQAIEKQNIQWEEKFQRIINASMNICPYKGASIGGQGEIDHIYPRSLSKKHFGVIFNSEVNLIYCSSQGNREKKEEHYLLEHLSPLYLKHQFGTDNVSDIKNFISQNVANIKKYISFHLLTPEQQKAARHALFLDYDDEAFKTITKFLMSQQKARVNGTQKFLGKQIMEFLSTLADSKQLQLEFSIKQITAEEVHDHRELLSKQEPKLVKSRQQSFPSHAIDATLTMSIGLKEFPQFSQELDNSWFINHLMPDEVHLNPVRSKEKYNKPNISSTPLFKDSLYAERFIPVWVKGETFAIGFSEKDLFEIKPSNKEKLFTLLKTYSTKNPGESLQELQAKSKAKWLYFPINKTLALEFLHHYFHKEIVTPDDTTVCHFINSLRYYTKKESITVKILKEPMPVLSVKFESSKKNVLGSFKHTIALPATKDWERLFNHPNFLALKANPAPNPKEFNEFIRKYFLSDNNPNSDIPNNGHNIKPQKHKAVRKVFSLPVIPGNAGTMMRIRRKDNKGQPLYQLQTIDDTPSMGIQINEDRLVKQEVLMDAYKTRNLSTIDGINNSEGQAYATFDNWLTLPVSTFKPEIIKLEMKPHSKTRRYIRITQSLADFIKTIDEALMIKPSDSIDDPLNMPNEIVCKNKLFGNELKPRDGKMKIVSTGKIVTYEFESDSTPQWIQTLYVTQLKKQP

SEQ ID NO: 771 - protein, 1428 aa, Parasutterella excrementihominis YIT 11859
MGKTHIIGVGLDLGGTYTGTFITSHPSDEAEHRDHSSAFTVVNSEKLSFSSKSRTAVRHRVRSYKGFDLRRRLLLLVAEYQLLQKKQTLAPEERENLRIALSGYLKRRGYARTEAETDTSVLESLDPSVFSSAPSFTNFFNDSEPLNIQWEAIANSPETTKALNKELSGQKEADFKKYIKTSFPEYSAKEILANYVEGRRAILDASKYIANLQSLGHKHRSKYLSDILQDMKRDSRITRLSEAFGSTDNLWRIIGNISNLQERAVRWYFNDAKFEQGQEQLDAVKLKNVLVRALKYLRSDDKEWSASQKQIIQSLEQSGDVLDVLAGLDPDRTIPPYEDQNNRRPPEDQTLYLNPKALSSEYGEKWKSWANKFAGAYPLLTEDLTEILKNTDRKSRIKIRSDVLPDSDYRLAYILQRAFDRSIALDECSIRRTAEDFENGVVIKNEKLEDVLSGHQLEEFLEFANRYYQETAKAKNGLWFPENALLERADLHPPMKNKILNVIVGQALGVSPAEGTDFIEEIWNSKVKGRSTVRSICNAIENERKTYGPYFSEDYKFVKTALKEGKTEKELSKKFAAVIKVLKMVSEVVPFIGKELRLSDEAQSKFDNLYSLAQLYNLIETERNGFSKVSLAAHLENAWRMTMTDGSAQCCRLPADCVRPFDGFIRKAIDRNSWEVAKRIAEEVKKSVDFTNGTVKIPVAIEANSFNFTASLTDLKYIQLKEQKLKKKLEDIQRNEENQEKRWLSKEERIRADSHGICAYTGRPLDDVGEIDHIIPRSLTLKKSESIYNSEVNLIFVSAQGNQEKKNNIYLLSNLAKNYLAAVFGTSDLSQITNEIESTVLQLKAAGRLGYFDLLSEKERACARHALFLNSDSEARRAVIDVLGSRRKASVNGTQAWFVRSIFSKVRQALAAWTQETGNELIFDAISVPAADSSEMRKRFAEYRPEFRKPKVQPVASHSIDAMCIYLAACSDPFKTKRMGSQLAIYEPINFDNLFTGSCQVIQNTPRNFSDKTNIANSPIFKETIYAERFLDIIVSRGEIFIGYPSNMPFEEKPNRISIGGKDPFSILSVLGAYLDKAPSSEKEKLTIYRVVKNKAFELFSKVAGSKFTAEEDKAAKILEALHFVTVKQDVAATVSDLIKSKKELSKDSIENLAKQKGCLKKVEYSSKEFKFKGSLIIPAAVEWGKVLWNVFKENTAEELKDENALRKALEAAWPSSFGTRNLHSKAKRVFSLPVVATQSGAVRIRRKTAFGDFVYQSQDTNNLYSSFPVKNGKLDWSSPIIHPALQNRNLTAYGYRFVDHDRSISMSEFREVYNKDDLMRIELAQGTSSRRYLRVEMPGEKFLAWFGENSISLGSSFKFSVSEVFDNKIYTENAEFTKFLPKPREDNKHNGTIFFELVGPRVIFNYIVGGAASSLKEIFSEAGKERS

SEQ ID NO: 772 - protein, 1409 aa, Wolinella succinogenes DSM 1740
MLVSPISVDLGGKNTGFFSFTDSLDNSQSGTVIYDESFVLSQVGRRSKRHSKRNNLRNKLVKRLFLLILQEHHGLSIDVLPDEIRGLFNKRGYTYAGFELDEKKKDALESDTLKEFLSEKLQSIDRDSDVEDFLNQIASNAESFKDYKKGFEAVFASATHSPNKKLELKDELKSEYGENAKELLAGLRVTKEILDEFDKQENQGNLPRAKYFEELGEYIATNEKVKSFFDSNSLKLTDMTKLIGNISNYQLKELRRYFNDKEMEKGDIWIPNKLHKITERFVRSWHPKNDADRQRRAELMKDLKSKEIMELLTTTEPVMTIPPYDDMNNRGAVKCQTLRLNEEYLDKHLPNWRDIAKRLNHGKFNDDLADSTVKGYSEDSTLLHRLLDTSKEIDIYELRGKKPNELLVKTLGQSDANRLYGFAQNYYELIRQKVRAGIWVPVKNKDDSLNLEDNSNMLKRCNHNPPHKKNQIHNLVAGILGVKLDEAKFAEFEKELWSAKVGNKKLSAYCKNIEELRKTHGNTFKIDIEELRKKDPAELSKEEKAKLRLTDDVILNEWSQKIANFFDIDDKHRQRFNNLFSMAQLHTVIDTPRSGFSSTCKRCTAENRFRSETAFYNDETGEFHKKATATCQRLPADTQRPFSGKIERYIDKLGYELAKIKAKELEGMEAKEIKVPIILEQNAFEYEESLRKSKTGSNDRVINSKKDRDGKKLAKAKENAEDRLKDKDKRIKAFSSGICPYCGDTIGDDGEIDHILPRSHTLKIYGTVFNPEGNLIYVHQKCNQAKADSIYKLSDIKAGVSAQWIEEQVANIKGYKTFSVLSAEQQKAFRYALFLQNDNEAYKKVVDWLRTDQSARVNGTQKYLAKKIQEKLTKMLPNKHLSFEFILADATEVSELRRQYARQNPLLAKAEKQAPSSHAIDAVMAFVARYQKVFKDGTPPNADEVAKLAMLDSWNPASNEPLTKGLSTNQKIEKMIKSGDYGQKNMREVFGKSIFGENAIGERYKPIVVQEGGYYIGYPATVKKGYELKNCKVVTSKNDIAKLEKIIKNQDLISLKENQYIKIFSINKQTISELSNRYFNMNYKNLVERDKEIVGLLEFIVENCRYYTKKVDVKFAPKYIHETKYPFYDDWRRFDEAWRYLQENQNKTSSKDRFVIDKSSLNEYYQPDKNEYKLDVDTQPIWDDFCRWYFLDRYKTANDKKSIRIKARKTFSLLAESGVQGKVFRAKRKIPTGYAYQALPMDNNVIAGDYANILLEANSKTLSLVPKSGISIEKQLDKKLDVIKKTDVRGLAIDNNSFFNADFDTHGIRLIVENTSVKVGNFPISAIDKSAKRMIFRALFEKEKGKRKKKTTISFKESGPVQDYLKVFLKKIVKIQLRTDGSISNIVVRKNAADFTLSFRSEHIQKLLK

SEQ ID NO: 773 - protein, 1629 aa, Francisella novicida U112
MNFKILPIAIDLGVKNTGVFSAFYQKGTSLERLDNKNGKVYELSKDSYTLLMNNRTARRHQRRGIDRKQLVKRLFKLIWTEQLNLEWDKDTQQAISFLFNRRGFSFITDGYSPEYLNIVPEQVKAILMDIFDDYNGEDDLDSYLKLATEQESKISEIYNKLMQKILEFKLMKLCTDIKDDKVSTKTLKEITSYEFELLADYLANYSESLKTQKFSYTDKQGNLKELSYYHHDKYNIQEFLKRHATINDRILDTLLTDDLDIWNFNFEKFDFDKNEEKLQNQEDKDHIQAHLHHFVFAVNKIKSEMASGGRHRSQYFQEITNVLDENNHQEGYLKNFCENLHNKKYSNLSVKNLVNLIGNLSNLELKPLRKYFNDKIHAKADHWDEQKFTETYCHWILGEWRVGVKDQDKKDGAKYSYKDLCNELKQKVTKAGLVDFLLELDPCRTIPPYLDNNNRKPPKCQSLILNPKFLDNQYPNWQQYLQELKKLQSIQNYLDSFETDLKVLKSSKDQPYFVEYKSSNQQIASGQRDYKDLDARILQFIFDRVKASDELLLNEIYFQAKKLKQKASSELEKLESSKKLDEVIANSQLSQILKSQHTNGIFEQGTFLHLVCKYYKQRQRARDSRLYIMPEYRYDKKLHKYNNTGRFDDDNQLLTYCNHKPRQKRYQLLNDLAGVLQVSPNFLKDKIGSDDDLFISKWLVEHIRGFKKACEDSLKIQKDNRGLLNHKINIARNTKGKCEKEIFNLICKIEGSEDKKGNYKHGLAYELGVLLFGEPNEASKPEFDRKIKKFNSIYSFAQIQQIAFAERKGNANTCAVCSADNAHRMQQIKITEPVEDNKDKIILSAKAQRLPAIPTRIVDGAVKKMATILAKNIVDDNWQNIKQVLSAKHQLHIPIITESNAFEFEPALADVKGKSLKDRRKKALERISPENIFKDKNNRIKEFAKGISAYSGANLTDGDFDGAKEELDHIIPRSHKKYGTLNDEANLICVTRGDNKNKGNRIFCLRDLADNYKLKQFETTDDLEIEKKIADTIWDANKKDFKFGNYRSFINLTPQEQKAFRHALFLADENPIKQAVIRAINNRNRTFVNGTQRYFAEVLANNIYLRAKKENLNTDKISFDYFGIPTIGNGRGIAEIRQLYEKVDSDIQAYAKGDKPQASYSHLIDAMLAFCIAADEHRNDGSIGLEIDKNYSLYPLDKNTGEVFTKDIFSQIKITDNEFSDKKLVRKKAIEGFNTHRQMTRDGIYAENYLPILIHKELNEVRKGYTWKNSEEIKIFKGKKYDIQQLNNLVYCLKFVDKPISIDIQISTLEELRNILTTNNIAATAEYYYINLKTQKLHEYYIENYNTALGYKKYSKEMEFLRSLAYRSERVKIKSIDDVKQVLDKDSNFIIGKITLPFKKEWQRLYREWQNTTIKDDYEFLKSFFNVKSITKLHKKVRKDFSLPISTNEGKFLVKRKTWDNNFIYQILNDSDSRADGTKPFIPAFDISKNEIVEAIIDSFTSKNIFWLPKNIELQKVDNKNIFAIDTSKWFEVETPSDLRDIGIATIQYKIDNNSRPKVRVKLDYVIDDDSKINYFMNHSLLKSRYPDKVLEILKQSTIIEFESSGFNKTIKEMLGMKLAGIYNETSNN

SEQ ID NO: 774 - DNA, 27 bp, Artificial Sequence
  Description of artificial sequence: Synthetic oligonucleotide
  modified_base (25)..(25): n is a, c, t, g, uknown or other
  misc_feature (25)..(25): n is a, c, g, or t
gataatctcttatagaattgaaagngg

SEQ ID NO: 775 - DNA, 27 bp, Artificial Sequence
  Description of artificial sequence: Synthetic oligonucleotide
  modified_base (25)..(25): n is a, c, t, g, unknown or other
  misc_feature (25)..(25): n is a, c, g, or t
gttaatcttctatagagttgaaagngg

SEQ ID NO: 776 - DNA, 33 bp, Artificial Sequence
  Description of artificial sequence: Synthetic oligonucleotide
  modified_base (31)..(31): n is a, c, t, g, unknown or other
  misc_feature (31)..(31): n is a, c, g, or t
gttaaaatcagaccaaaatgggattgaaatngg

SEQ ID NO: 777 - DNA, 32 bp, Artificial Sequence
  Description of artificial sequence: Synthetic oligonucleotide
  modified_base (30)..(30): n is a, c, t, g, unknown or other
  misc_feature (30)..(30): n is a, c, g, or t
gttttaactacttattatgaaatctaaatngg

SEQ ID NO: 778 - DNA, 35 bp, Artificial Sequence
  Description of artificial sequence: Synthetic oligonucleotide
gtctcacccttcatgggtgagtggattgaaatgaa

SEQ ID NO: 779 - DNA, 34 bp, Artificial Sequence
  Description of artificial sequence: Synthetic oligonucleotide
gtcgcgtcctcacgggcgcgtggattgaaacgaa

SEQ ID NO: 780 - DNA, 32 bp, Artificial Sequence
  Description of artificial sequence: Synthetic oligonucleotide
gwgttccccgcgccagcggggataaaccgctt

SEQ ID NO: 781 - DNA, 32 bp, Artificial Sequence
  Description of artificial sequence: Synthetic oligonucleotide
gtgttccccacatgcgtggggatgaaccgctt

SEQ ID NO: 782 - DNA, 32 bp, Artificial Sequence
  Description of artificial sequence: Synthetic oligonucleotide
gwgttccccgcgccagcggggataaaccgcat

SEQ ID NO: 783 - DNA, 32 bp, Artificial Sequence
  Description of artificial sequence: Synthetic oligonucleotide
gwgttccccgcgccagcggggataaaccgcct

SEQ ID NO: 784 - DNA, 32 bp, Artificial Sequence
  Description of artificial sequence: Synthetic oligonucleotide
gwgttccccgcgccagcggggataaaccgctc

SEQ ID NO: 785 - DNA, 30 bp, Artificial Sequence
  Description of artificial sequence: Synthetic oligonucleotide
gttcactgccgtgtaggcagctaagaaagg

SEQ ID NO: 786 - DNA, 30 bp, Artificial Sequence
  Description of artificial sequence: Synthetic oligonucleotide
gttcaccgccgcacaggcggcttagaaagg

SEQ ID NO: 787 - DNA, 43 bp, Artificial Sequence
  Description of artificial sequence: Synthetic oligonucleotide
  modified_base (6)..(7): n is a, c, t, g, unknown, or other
  misc_feature (6)..(7): n is a, c, g, or t
wttctnngtttttgtactctcaagatttaagtaactgtacaac

SEQ ID NO: 788 - DNA, 44 bp, Artificial Sequence
  Description of artificial sequence: Synthetic oligonucleotide
  modified_base (6)..(8): n is a, c, t, g, unknown or other
  misc_feature (6)..(8): n is a, c, g, or t
tttyrnnngtttttgtactctcaagatttaagtaactgtacaac

SEQ ID NO: 789 - DNA, 41 bp, Artificial Sequence
  Description of artificial sequence: Synthetic oligonucleotide
  modified_base (2)..(2): n is a, c, t, g, unknown or other
  misc_feature (2)..(2): n is a, c, g, or t
  modified_base (5)..(5): n is a, c, t, g, unknown or other
  misc_feature (5)..(5): n is a, c, g, or t
cnccngttttagagctgtgttgtttcgaatggttccaaaac

SEQ ID NO: 790 - DNA, 39 bp, Artificial Sequence
  Description of artificial sequence: Synthetic oligonucleotide
  modified_base (3)..(3): n is a, c, t, g, unknown or other
  misc_feature (3)..(3): n is a, c, g, or t
ccngttttagagctatgctgttttgaatggtcccaaaac

SEQ ID NO: 791 - DNA, 39 bp, Artificial Sequence
  Description of artificial sequence: Synthetic oligonucleotide
  modified_base (3)..(3): n is a, c, t, g, unknown or other
  misc_feature (3)..(3): n is a, c, g, or t
ccngttttagagctatgttattttgaatgctaccaaaac

1-48. (canceled)

49. A regulatable-AAV particle comprising a viral genome, the viral genome comprising:
(a) a sequence encoding at least one payload;
(b) a sequence encoding at least one regulatable element,
wherein the regulatable element comprises a DNA binding domain, a transactivation domain, a repressor domain, a ligand binding domain, and/or an enzyme.

50. The regulatable-AAV particle of claim 49, wherein the genome comprises a sequence encoding a first regulatable element, and the AAV particle comprises an AAV capsid which comprises a sequence encoding a second regulatable element.

51. The regulatable-AAV particle of claim 50, wherein the first regulatable element regulates the expression of the second regulatable element.

52. The regulatable-AAV particle of claim 49, wherein the regulatable element comprises a heterologous domain which:
(a) stabilizes the payload;
(b) destabilizes the payload;
(c) is stabilized in the presence of a ligand and destabilized in the absence of the ligand; or
(d) is destabilized in the presence of a ligand and stabilized in the absence of the ligand.

53. The regulatable-AAV particle of claim 49, wherein the regulatable element comprises a DNA binding domain, and wherein the DNA binding domain is selected from the group consisting of Gal4, CREB, HSF, ZFHD1, Ecdysone Receptor, glucocorticoid receptor, RXR, RAR, Stat proteins, myc, zinc finger nuclease, TAL effectors, and RNA guided DNA binding domains.

54. The regulatable-AAV particle of claim 49, wherein the regulatable element comprises a transactivation domain, and wherein the transactivation domain is selected from the group consisting of Gal4, Oaf1, Leu3, Rtg3, Pho4, Gln3, Gcn4, p53, RTg3, CREB, Gli3, E2A, HSF1, NF-IL6, myc, NFAT, NF-κB, and VP16.

55. The regulatable-AAV particle of claim 49, wherein the regulatable element comprises a repressor domain, and wherein the repressor domain is selected from the group consisting of KRAB, ERD, and SID.

56. The regulatable-AAV particle of claim 49, wherein the regulatable element comprises a ligand binding domain, and wherein the ligand binding domain is selected from the group consisting of Ecdysone Receptor, glucocorticoid receptor, RXR, RAR, tet repressor, rapamycin, and rapamycin analog binding domains.

57. The regulatable-AAV particle of claim 49, wherein the regulatable element comprises an enzyme to cleave the payload.

58. The regulatable-AAV particle of claim 57, wherein the enzyme is selected from the group consisting of meganuclease, zinc finger nuclease, TALEN, recombinase, integrase, and Cas9.

59. The regulatable-AAV particle of claim 58, wherein the enzyme is Cas9 and the regulatable element further comprises a single guide RNA (sgRNA).

60. The regulatable-AAV particle of claim 49, wherein the nucleic acid encoding the payload comprises one or more CRISPR recognition sequences.

61. The regulatable-AAV particle of claim 49, wherein the payload is a polypeptide of interest or a nucleic acid of interest.

62. The regulatable-AAV particle of claim 61, wherein the polypeptide of interest is a therapeutic protein.

63. The regulatable-AAV particle of claim 61, wherein the nucleic acid of interest is a modulatory nucleic acid selected from the group consisting of tRNA, rRNA, tmRNA, miRNA, RNAi, siRNA, piRNA, shRNA antisense RNA, double stranded RNA, snRNA, snoRNA, and long non-coding RNA.

64. A method of synthesizing a regulatable-AAV particle comprising:
a) providing viral replication cells comprising:
i) a payload construct expression vector comprising a payload and one or more regulatable elements flanked on each side by a parvoviral ITR sequence to produce a payload construct expression vector to produce a payload construct particle; and
ii) a viral construct expression vector(s) comprising parvoviral rep and/or cap gene sequences under the control of one or more regulatable elements to produce a viral construct expression vector to produce a viral construct particle; and
b) co-infecting a viral replication cell with the payload construct particle the viral construct particle to produce a regulatable-AAV particle.

65. A method of synthesizing a regulatable-AAV particle comprising co-infecting a viral replication cell with (a) a payload construct viral particle which comprises a payload and one or more regulatable elements, and (b) a viral construct viral particle comprising parvoviral rep and/or cap gene sequences under the control of the one or more regulatable elements.

66. A method of regulating the expression of a protein of interest or a nucleic acid of interest, the method comprising contacting a subject with the regulatable-AAV particle of claim 49.

67. A method of treating a CNS disorder in a subject in need thereof, the method comprising administering to the subject a therapeutically effective amount of one or more regulatable-AAV particles of claim 49.

68. The method of claim 67, wherein the CNS disorder is selected from the group consisting of: Alzheimer's Disease, Amyotrophic lateral sclerosis, Creutzfeldt-Jakob Disease, Huntingtin's Disease, Friedreich's ataxia, Parkinson's Disease, Multiple System Atrophy, Spinal Muscular Atrophy, Multiple Sclerosis, Primary progressive aphasia, Progressive supranuclear palsy, Dementia, Brain Cancer, Degenerative Nerve Diseases, Encephalitis, Epilepsy, Genetic Brain Disorders that cause neurodegeneration, Retinitis pigmentosa, Head and Brain Malformations, Hydrocephalus, Stroke, Prion disease, and Infantile neuronal ceroid lipofuscinosis.
